(19) United States
(12) Patent Application Publication
(10) Pub. No.: US 2020/0150117 A1
(43) Pub. Date: May 14, 2020

(54) IMMUNO-ONCOLOGY FOR THE TREATMENT OF CANCER

(71) Applicant: Oncimmune Germany GmbH, Dortmund (DE)

(72) Inventors: Hans-Dieter ZUCHT, Hannover (DE); Petra BUDDE, Dortmund (DE); Peter SCHULZ-KNAPPE, Hemmingen (DE)

(21) Appl. No.: 16/625,898

(22) PCT Filed: Jun. 23, 2018
(86) PCT No.: PCT/EP2018/066840

§ 371 Date: Dec. 23, 2019

Related U.S. Application Data
(60) Provisional application No. 62/524,220, filed on Jun. 23, 2017.

(51) Int. Cl. G01N 33/564; G01N 33/574

(52) U.S. Cl. CPC G01N 33/564; G01N 2800/52; G01N 33/57434

(57) ABSTRACT

The invention relates to a method of identifying a tumor-associated antigen (TAA) for prostate cancer. Moreover, the invention provides a method of identifying a TAA as a marker for prostate cancer vaccination response. Particularly, a method of identifying and treating a prostate cancer patient with PROSTVAC therapy or for vaccination with a prostate antigen.

### BACKGROUND OF THE INVENTION

[0001] According to the World Health Organization (WHO) cancer is one of the leading causes of morbidity and mortality worldwide, with approximately 14 million new cases and 8.2 million cancer deaths in 2012 worldwide (Ferlay et al., 2015). An estimated 21.6 million new cancer cases are predicted for 2030 (an increase of 53 percent from 2012.

[0002] The economic impact of cancer is significant is increasing. In the US the total annual economic cost of cancer in 2010 were estimated at approximately US$ 1.16 trillion.

[0003] According to GLOBOCON the four most commonly new diagnosed cancer types in 2012 were lung (1.82 million), breast (1.67 million), colorectal (1.36 million), and prostate cancer (1.1 million) (Ferlay et al., 2015).

[0004] There are many types of cancer treatment, which depend on the cancer type. These include classical treatments such as surgery with chemotherapy and/or radiation therapy or hormone therapy. New therapies aim to directly target the tumor or to inhibit the growth of the tumor with tyrosine kinase inhibitors, monoclonal antibodies, and proteasome inhibitors.

[0005] Despite improvements in current therapies, the low survival rates of cancer are due to inadequate early diagnosis, resistance to current therapies, and ineffective treatment. Thus, alternative treatment approaches are desperately needed for cancer.

[0006] In contrast to targeting cancer-specific oncogenes, which promote survival and metastasis of cancer, the primary goal of cancer immunotherapy is to stimulate the human immune system to identify and destroy developing tumors.

[0007] The concept of cancer immunotherapy is based on the finding that many tumor cells express abnormal proteins and molecules, which in theory should be recognized by the immune system. Proteins, which are present in the tumor and elicit an immune response, are called tumor-associated antigens (TAA). The group of TAA comprises mutated proteins, overexpressed or aberrantly expressed proteins, proteins produced by oncogenic viruses, germline-expressed proteins, glycoproteins or proteins, which are produced in small quantities or are not exposed to the immune system. The immune response to TAA includes cellular processes as well as the production of antibodies against TAA.

[0008] However, forcing immune cells to recognize the tumor as foreign is proving to be much more difficult than anticipated. This is because the tumor effectively suppresses immune responses by activating negative regulatory pathways. These negative regulatory pathways are called immune-checkpoints, which under normal physiologic conditions; maintain a careful balance between activating and inhibitory signals thereby protecting the normal tissue from damage.

[0009] Collectively, these findings have led to different immunotherapeutic approaches including active, passive and immunomodulatory approaches.

[0010] Active immunotherapies directly stimulate the immune system to target tumors using inflammatory factors such as cytokines or therapeutic cancer vaccines.

[0011] For example, PROSTVAC cancer vaccination is intended to trigger a specific and targeted immune response against prostate cancer. PROSTVAC is a virus-based vaccine that carries the tumor-associated antigen PSA/KLK3 (prostate-specific antigen) along with three natural human immune-enhancing costimulatory molecules collectively designated as TRICOM (LFA3, ICAM1, and B7.1/CD80). The PSA-TRICOM vaccines infects antigen-presenting cells (APCs) and generate proteins that are expressed on the surface of the APCs by major histocompatibility complex (MHC) proteins. This leads to T-cell activation.

[0012] PROSTVAC is currently tested in phase 3 clinical trials for treating minimally symptomatic metastatic prostate cancer (mCRPC). Prior phase 2 clinical studies showed that patients who received PROSTVAC had a median overall survival that was 8.5 months longer than the control group (25.1 versus 16.6 months) and a 44% reduction in the risk of death (stratified log-rank P=0.0061). PROSTVAC was generally well tolerated, with the most common side effects including injection site reactions, fever, fatigue, and nausea (Kantoff et al., 2017).

[0013] Passive immunotherapies usually utilize monoclonal antibodies targeting immune checkpoint molecules. The cytotoxic T-lymphocyte-associated antigen 4 (CTLA-4) and programmed death 1 (PD-1) immune checkpoints are negative regulators of T-cell immune function, when bound to their respective ligands CD80/86 and programmed cell-death ligand 1 and 2 (PDL1/PDL2).

[0014] In addition to anti-CTLA4 and anti-PD1/PDL1 antibodies, drugs targeting other checkpoints such as lymphocyte activation gene 3 protein (LAG3), T cell immunoglobulin mucin 3 (TIM-3), and IDO (Indoleamine 2,3-dioxygenase) are in development.

[0015] Inhibition of checkpoint inhibitors, resulting in increased activation of the immune system, has led to new immunotherapies for melanoma, non-small cell lung cancer, and other cancers (Buchbinder and Desai, 2016).

[0016] Ipilimumab, an inhibitor of CTLA-4, is approved for the treatment of advanced or unresectable melanoma.

[0017] Nivolumab and pembrolizumab, both PD-1 inhibitors, are approved to treat patients with advanced or metastatic melanoma and patients with metastatic, refractory non-small cell lung cancer.

[0018] Anti-PDL1 inhibitor avelumab has received orphan drug designation by the European Medicines Agency for the treatment of gastric cancer in January 2017. The US Food and Drug Administration (FDA) approved it in March 2017 for Merkel-cell carcinoma, an aggressive type of skin cancer.

[0019] Despite the fact that checkpoint inhibitors, demonstrated clinical efficacy across multiple cancer types, checkpoint inhibitor drugs are not effective against all cancer types, nor in every patient within a cancer type (Brahmer et al., 2012).

[0020] In addition, compared to cancer vaccination strategies, checkpoint inhibitors can induce severe immune-related adverse events (irAE). The main side effects include diarrhea, colitis, hepatitis, skin toxicities, arthritis, diabetes, endocrinopathies such as hypophysitis and thyroid dysfunction (Spain et al., 2016).

[0021] Therefore, biomarkers are needed to predict both clinical efficacy and toxicity. Such biomarkers may guide patient selection for both monotherapy and combination therapy (Topalian et al., 2016).

[0022] There are apparent differences between the CTLA4 and PD1 pathways of the immune response. CTLA4 acts more globally on the immune response by stopping potentially autoreactive T cells at the initial stage of naive T-cell activation, typically in lymph nodes. The PD-1 pathway regulates previously activated T cells at the later stages of an immune response, primarily in peripheral tissues (Buchbinder and Desai, 2016).

[0023] Substantial efforts have been undertaking to identify biomarkers for predicting which patient will respond best to immune checkpoint inhibition.

[0024] Given the mechanism of action of inhibiting the PD1 pathway, several studies have evaluated the expression of the PDL1 ligand in the tumor as a biomarker of clinical response. However, differences regarding the predictive value of PDL1 expression have been found. This limits the current use of PDL1 as a biomarker for predicting clinical response. The differences in the utility of PDL1 as biomarker may be caused by differences in the assay type used in different studies and by variable expression of PDL1 during therapy (Manson et al., 2016).

[0025] Since checkpoint inhibition is typically viewed as enhancing the activity of effector T cells in the tumor and tumor environment, other biomarker approaches have focused on identifying TAA recognized by T cells. However, this approach is limited to exploratory analyses and is not practical in a routine laboratory setting because it requires patient-specific MHC reagents (Gulley et al., 2014).

[0026] A largely overlooked immune cell type in the context of immunotherapies are B cells, which can exert both anti-tumor and tumor-promoting effects by providing co-stimulatory signals and inhibitory signals for T cell activation, cytokines, and antibodies (Chiaruttini et al., 2017). B-cells produce anti-tumor antibodies, which can potentially mediate antibody-dependent cellular cytotoxicity (ADCC) of tumor cells. It is well established that many cancer types induce an antibody response, which can be used for diagnostic purposes. Although some cancer patients show an antibody response to neo-antigens restricted to the tumor, the majority of antibodies in cancer patients are directed to self-antigens and are therefore autoantibodies (Bei et al., 2009). Breakthrough of tolerance and elevated levels of autoantibodies to self-antigens are also prominent features of many autoimmune diseases.

[0027] Thus, autoantibodies hold the potential to serve as biomarkers of a sustained humoral anti-tumor response and irAE in cancer patients treated with immunotherapeutic approaches.

[0028] Compared to biomarker strategies involving the identification of TAA-specific T-cells, the identification of autoantibodies can be performed using modern multiplex high-throughput screening approaches using minimal amounts of serum (Budde et al., 2016).

### BRIEF DESCRIPTION OF DRAWINGS

[0029] FIG. 1 depicts a design of the cancer screen. KEGG Pathway Analysis ((Kyoto Encyclopedia of Genes and Genomes) of human (has) proteins and antigens are included in the cancer autoantibody screen. Proteins were selected to represent the following three categories: Tumor and autoimmunity signaling pathways, Immune-related pathways and proteins or genes overexpressed in different cancer types. The number of proteins per category is indicated at the x-axis.

[0030] FIG. 2 depicts Box-and-Whisker Plots of four autoantibodies in prostate cancer patients (PCa) and healthy controls (HC). Box-and-Whisker Plots of IgG autoantibody reactivities are shown against CDKN1A, MYLK3 and VASP in serum samples of prostate cancer patients PCa) and healthy controls. A mix of SIPA1 and MCM2 were coupled to the same Luminex bead region. Numbers at the y-axis indicate the Luminex Median Fluorescence Intensity values (MFI).

[0031] FIG. 3 depicts a Partial Least Squares (PLS) regression analysis of the autoantibody reactivity in baseline and post-treatment serum samples treated with PROSTVAC. The Partial Least Squares (PLS) Biplot is of Component 5 and 6 of antigens and autoantibodies induced by PROSTVAC treatment (“Study.Day” and pre_post_treatment.post”. The biplot of components 5 versus 6 shows the regression relationship between clinical and demographic predictors shown as vectors in the graph and all autoantibody reactivities. The following predictors were used in the analysis: Age of donor (“age.of.donor”), overall survival (“overall.survival”), time on study as a measure of progression free survival or time to progression (“time.on.study”), sample collected at study day T0, T1, T2 (“study.day”), autoantibodies measure in baseline samples (“pre_post_treatment.pre”) and post-treatment samples T1 and T2 (“pre_post_treatment.post”). In this projection, antigens, which are further away from the origin and located in the vicinity of the vector (“pre_post_treatment.post”) induce an antibody response following PROSTVAC treatment.

[0032] FIG. 4 illustrates antigens and autoantibodies correlating with progression-free survival (PFS) in PROSTVAC treated patients. FIG. 4 depicts scatter plots showing examples of autoantibodies correlating with the time patients remained in the study given in days (“time.on.study.days”). This corresponds to the time until progression was observed, which is the time to progression or progression-free survival. FIG. 4 shows autoantibodies reactive with LGALS3BP, SP100, PKN1 and CREM. The y-axis shows the log 2 MFI value of autoantibody reactivity. The Pearson's correlation coefficient and p-value is provided for each autoantibody and shown on top of the graphs.

[0033] FIG. 5 depicts scatter plots showing examples of autoantibodies correlating with overall survival (OS) in days. (“Overall.Survival.Days” of PROSTVAC treated patients who remained in the study is given in days (“time.on.study.days”). Antigens and autoantibodies correlate with overall survival (OS) in PROSTVAC treated patients. FIG. 5 shows two autoantibodies reactive with USP33 and TNIP2 with positive correlation to OS. Autoantibodies reactive with MAZ and NOVA2 are negatively correlated with OS and higher levels predict poor OS. The y-axis shows the log 2 MFI value of autoantibody reactivity. The Pearson's correlation coefficient and p-value is provided for each autoantibody and shown on top of the graphs.

[0034] FIG. 6 shows a Partial Least Squares (PLS) regression analysis of the autoantibody reactivity in baseline and post-treatment serum samples treated with PROSTVAC plus ipilimumab. Partial Least Squares (PLS) Biplot shows Component 5 and 6 of antigens and autoantibodies induced by PROSTVAC plus ipilumumab treatment (“Study.Day” and pre_post_treatment.post”). The biplot of components 5 versus 6 shows the regression relationship between clinical and demographic predictors shown as vectors in the graph and all autoantibody reactivities. The following predictors were used in the analysis: Age of donor (“age.of.donor”), overall survival (“overall.survival”), time on study (“time.on.study”), sample collected at study day T0, T1, T2 (“study.day”), overall survival (OS) (“best.response”), immune related adverse events (irAE, “Codierung.iRAEs.R17), autoantibodies measured in baseline samples (“pre_post_treatment.pre”) and post-treatment samples T1 and T2 (“pre_post_treatment.post”). In this projection, antigens, which are further away from the origin and located in the vicinity of the vector (“pre_post_treatment.post”) induce an antibody response following PROSTVAC plus ipilimumab treatment.

[0035] FIG. 7 illustrates antigens and autoantibodies correlating with OS-Halabi (“best response”) in PROSTVAC plus ipilumumab treated patients. Antigens and autoantibodies correlate with OS-Halabi (“best response”) in PROSTVAC plus ipilumumab treated patients. The scatter plots show examples of autoantibodies correlating with the predicted median OS by the Halabi nomogram (OS-Halabi, “Best.Response”). FIG. 7 shows that autoantibodies reactive with A1BG and ZNF574 are positively correlated to OS-Halabi. Autoantibodies reactive with MAGEA8 and HMMR show negative correlation with OS-Halabi. The y-axis shows the log 2 MFI value of autoantibody reactivity. The Pearson's correlation coefficient and p-value is provided for each autoantibody and shown on top of the graphs.

[0036] FIG. 8 illustrates scatter plots showing examples of autoantibodies correlating with overall survival (OS) in days (“Overall.Survival.Days”) of PROSTVAC treated patients. Antigens and autoantibodies correlate with overall survival in days (OS) in PROSTVAC plus ipilumumab treated patients. FIG. 8 shows two autoantibodies reactive with SNRNP70 and RELB with positive correlation to OS. Autoantibodies reactive with HMMR and CREBBP are negatively correlated with OS and higher levels predict poor OS. The y-axis shows the log 2 MFI value of autoantibody reactivity. The Pearson's correlation coefficient and p-value is provided for each autoantibody and shown on top of the graphs.

[0037] FIG. 9 depicts a Box-and-Whisker plot of anti-IDO1 antibodies measured in pre-treatment T0 (“pre”) and post-treatment T1 and T2 (“post”) samples. Anti-IDO1 antibodies predict overall survival (OS) in pre-treatment (“pre”)and post-treatment (“post”) samples of prostate cancer patients: Combined analysis of PROSTVAC and PROSTVAC plus ipilimumab. Patient samples were divided into four groups based on their overall survival in month. Anti-IDO1 antibodies predict overall survival (OS) in pre-treatment (“pre”) and are elevated in post-treatment (“post”) samples of prostate cancer patients. FIG. 9 shows the combined analysis of samples from two studies, PROSTVAC and PROSTVAC plus ipilimumab.

[0038] FIG. 10 illustrates Box-and-Whisker plots showing two autoantibodies against IRAK4 and RBMS1_c, which show higher levels in cancer patients that develop irAEs following treatment with PROSTVAC plus ipilimumab. Antigens and autoantibodies associated with irAE in PROSTVAC plus ipilumumab treated patients. The test antigen RBMS1_c is an enzymatically modified recombinant protein, in which the amino acid arginine is converted into the amino acid citrulline by a deimination or citrullination reaction. Citrullinated proteins and peptides are well-known antigens of the autoimmune disease rheumatoid arthritis.

### SUMMARY OF THE INVENTION

[0039] In one aspect is provided a method of identifying a tumor-associated antigen (TAA) for prostate cancer. A group of patients with prostate cancer is selected. Also, a group of patients who are healthy are selected. A sample from at least one patient in the group with prostate cancer is assayed for the level of an autoantibody to an antigen. The level of the autoantibody to an antigen in the group of patients with prostate cancer is compared to the level of the autoantibody in the group of healthy patients. The antigen is determined to be a TAA for prostate cancer if the level of the autoantibody to the antigen is statistically different between the group of patients with prostate cancer versus the group of healthy patients.

[0040] In another aspect is provided a method of identifying a TAA as a marker for prostate cancer vaccination response. A group of patients with prostate cancer who have been vaccinated with a vaccine effective to induce an immune response against a prostate cancer antigen is selected. Also, a group of patients with prostate cancer who have not been vaccinated with the vaccine is selected. A sample from at least one patient in the group with prostate cancer is assayed for the level of an autoantibody to an antigen. The level of the autoantibody to an antigen in the group of patients with prostate cancer who have been vaccinated is compared to the level of the autoantibody in the group of patients with prostate cancer who have not been vaccinated. The antigen is determined to be a TAA for prostate cancer if the level of the autoantibody to the antigen is statistically different between the group of patients who have been vaccinated and the group of patients who have not been vaccinated.

[0041] In another aspect is provided a method of identifying and treating a prostate cancer patient with PROSTVAC therapy or for vaccination with a prostate antigen. The level of one or more antigens encoded by a gene listed in Table 4 having a positive value for r_in_PROSTVAC Progression-free survival is determined in a sample from the prostate cancer patient who has undergone PROSTVAC therapy. The level of the same one or more antigens in a sample from a prostate cancer patient, or a group of prostate cancer patients, who have not undergone PROSTVAC therapy. The levels of the one or more antigens in the patient who has undergone PROSTVAC therapy are compared with the corresponding levels of the patient or group of patients who have not undergone PROSTVAC therapy. If the level of the one or more antigens in the patient (encoded by a gene listed in Table 4 having a positive value for r_in_PROSTVAC Progression-free survival) is greater than the average level of the one or more antigens in the group of patients with prostate cancer, then PROSTVAC therapy, Ipilimumab, and/or the vaccination with a prostate antigen is administered to the patient.

[0042] Additional aspects and embodiments are described below in the Detailed Description.

### DETAILED DESCRIPTION OF THE INVENTION

[0043] In one aspect is provided a method of identifying a tumor-associated antigen (TAA) for prostate cancer. A group of patients with prostate cancer is selected. Also, a group of patients who are healthy are selected. A sample from at least one patient in the group with prostate cancer is assayed for the level of an autoantibody to an antigen. The level of the autoantibody to an antigen in the group of patients with prostate cancer is compared to the level of the autoantibody in the group of healthy patients. The antigen is determined to be a TAA for prostate cancer if the level of the autoantibody to the antigen is statistically different between the group of patients with prostate cancer versus the group of healthy patients.

[0044] Within the scope of this invention, the term “patient” is understood to mean any test subject (human or mammal), with the provision that the test subject is tested for prostate cancer.

[0045] Autoantibodies can be formed by a patient before prostate cancer progresses or otherwise shows symptoms. Early detection, diagnosis and also prognosis and (preventative) treatment would therefore be possible years before the visible onset of progression. Devices and means (arrangement, array, protein array, diagnostic tool, test kit) and methods described herein can enable a very early intervention compared with known methods, which considerably improves the prognosis and survival rates. Since the prostate cancer-associated autoantibody profiles change during the establishment and treatment/therapy of prostate cancer, the invention also enables the detection and the monitoring of prostate cancer at any stage of development and treatment and also monitoring within the scope of aftercare in the case of prostate cancer. The means according to the invention also allow easy handling at home by the patient himself and cost-effective routine precautionary measures for early detection and also aftercare.

[0046] Different patients may have different prostate cancer-associated autoantibody profiles, for example different cohorts or population groups differ from one another. Here, each patient may form one or more different prostate cancer-associated autoantibodies during the course of the development of prostate cancer and the progression of the disease of prostate cancer, that is to say also different autoantibody profiles. In addition, the composition and/or the quantity of the formed prostate cancer-associated autoantibodies may change during the course of the prostate cancer development and progression of the disease, such that a quantitative evaluation is necessary. The therapy/treatment of prostate cancer also leads to changes in the composition and/or the quantity of prostate cancer-associated autoantibodies. The large selection of prostate cancer-associated marker sequences according to the invention allows the individual compilation of prostate cancer-specific marker sequences in an arrangement for individual patients, groups of patients, certain cohorts, population groups, and the like. In an individual case, the use of a prostate cancer-specific marker sequence may therefore be sufficient, whereas in other cases at least two or more prostate cancer-specific marker sequences have to be used together or in combination in order to produce a meaningful autoantibody profile.

[0047] Compared with other biomarkers, the detection of prostate cancer-associated autoantibodies for example in the serum/plasma has the advantage of high stability and storage capability and good detectability. The presence of autoantibodies also is not subject to a circadian rhythm, and therefore the sampling is independent of the time of day, food intake and the like.

[0048] In addition, the prostate cancer-associated autoantibodies can be detected with the aid of the corresponding antigens/autoantigens in known assays, such as ELISA or Western Blot, and the results can be checked for this.

[0049] In some embodiments, the antigen is an antigen encoded by a gene listed in Table 1. In some embodiments, the TAA is encoded by a gene listed in Table 2.

[0050] Various ways of performing the assay can be undertaken. A portion of serum from the patient with prostate cancer is contacted with a sample of an antigen. The antigen may be immobilized onto a solid support, in particular a filter, a membrane, a bead or small plate or bead, for example a magnetic or fluorophore-labelled bead, a silicon wafer, glass, metal, plastic, a chip, a mass spectrometry target or a matrix. A microsphere as a solid support may also be used. Multiple antigens may be coupled to multiple different solid supports and then arranged on an array.

[0051] The array may be in the form of a “protein array”, which in the sense of this invention is the systematic arrangement of prostate cancer-specific marker sequences on a solid support, wherein the prostate cancer-specific marker sequences are proteins or peptides or parts thereof, and wherein the support is preferably a solid support.

[0052] The sample comprising any of the TAAs, autoantigens, autoantibodies, are part of, found in, or otherwise present in, a bodily fluid. The bodily fluid may be blood, whole blood, blood plasma, blood serum, patient serum, urine, cerebrospinal fluid, synovial fluid or a tissue sample, for example from tumour tissue from the patient. These bodily fluids and tissue samples can be used for early detection, diagnosis, prognosis, therapy control and aftercare.

[0053] The level of a TAA, autoantibody or antigen is assayed by measuring the degree of binding between a sample and the antigen. Binding according to the invention, binding success, interactions, for example protein-protein interactions (for example protein to prostate cancer-specific marker sequence, such as antigen/antibody) or corresponding “means for detecting the binding success” can be visualised for example by means of fluorescence labelling, biotinylation, radio-isotope labelling or colloid gold or latex particle labelling in the conventional manner. Bound antibodies are detected with the aid of secondary antibodies, which are labelled using commercially available reporter molecules (for example Cy, Alexa, Dyomics, FITC or similar fluorescent dyes, colloidal gold or latex particles), or with reporter enzymes, such as alkaline phosphatase, horseradish peroxidase, etc. and the corresponding colorimetric, fluorescent or chemiluminescent substrates. A readout is performed, for example, by means of a microarray laser scanner, a CCD camera or visually.

[0054] Comparisons may be performed by any number of statistical analyses, such as those described in Example 5 herein.

[0055] In another aspect is provided a method of identifying a TAA as a marker for prostate cancer vaccination response. A group of patients with prostate cancer who have been vaccinated with a vaccine effective to induce an immune response against a prostate cancer antigen is selected. Also, a group of patients with prostate cancer who have not been vaccinated with the vaccine is selected. A sample from at least one patient in the group with prostate cancer is assayed for the level of an autoantibody to an antigen. The level of the autoantibody to an antigen in the group of patients with prostate cancer who have been vaccinated is compared to the level of the autoantibody in the group of patients with prostate cancer who have not been vaccinated. The antigen is determined to be a TAA for prostate cancer if the level of the autoantibody to the antigen is statistically different between the group of patients who have been vaccinated and the group of patients who have not been vaccinated.

[0056] Another aspect provides a method of identifying and treating a prostate cancer patient with PROSTVAC therapy or for vaccination with a prostate antigen. The level of one or more antigens encoded by a gene listed in Table 4 having a positive value for r_in_PROSTVAC Progression-free survival is determined in a prostate cancer patient. The level of the one or more antigens in the prostate cancer patient is compared with an average level of the one or more antigens for a group of patients with prostate cancer. PROSTVAC therapy, Ipilimumab, and/or vaccination with a prostate antigen is administered if the level of the one or more antigens in the patient is greater than the average level of the one or more antigens in the group of patients with prostate cancer.

[0057] Any number of antigens may be tested, such as 2, 3, 4, 5, 6, 7, 8, 9, 10, 11, 12, 13, 14, 15, 16, 17, 18, 19, 20.

[0058] In some embodiments, the patient further has a reduced level of one or more antigens encoded by a gene listed in Table 4 having a negative value for r_in_PROSTVAC Progression-free survival as compared to the level in the group of patients with prostate cancer.

[0059] PROSTVAC is under development by Bavarian Nordic as a vaccine to be administered to prevent spread of metastatic prostate cancer. PROSTVAC may be helpful to treat men who have symptomatic or minimally symptomatic metastatic castration-resistant prostate cancer (mCRPC). PROSTVAC is a vaccine targeting PSA and is administered by a proprietary prime-boost method. PROSTVAC may be administered subcutaneously. Without wishing to be bound by theory, PROSTVAC may induce a direct immune response that attacks PSA-bearing metastatic prostate cancer cells.

[0060] Another aspect provides a method of identifying and treating a prostate cancer patient with PROSTVAC therapy or for vaccination with a prostate antigen. The level of one or more antigens encoded by a gene listed in Table 4 having a negative value for r_in_PROSTVAC Progression-free survival is determined in a prostate cancer patient. The level of the one or more antigens in the prostate cancer patient is compared with an average level of the one or more antigens for a group of patients with prostate cancer. PROSTVAC therapy, Ipilimumab, and/or the vaccination with a prostate antigen is administered if the level of the one or more antigens in the patient is less than the average level of the one or more antigens in the group of patients with prostate cancer.

[0061] Another aspect provides a method of monitoring the effectiveness of therapy in a prostate cancer patient previously treated with PROSTVAC vaccination or prostate antigen vaccination. The level of one or more antigens encoded by a gene listed in Table 4 having a negative value for r_in_PROSTVAC Progression-free survival is determined by assaying a sample from a prostate cancer patient. The level of the one or more antigens from the sample of the prostate cancer patient is compared with an average level of the one or more antigens for a group of patients with prostate cancer. A determination that PROSTVAC therapy is effective is made if the level of the one or more antigens in the patient is less than the average level of the one or more antigens in the group of patients with prostate cancer.

[0062] Another aspect provides a method of monitoring the effectiveness of therapy in a prostate cancer patient previously treated with PROSTVAC vaccination or prostate antigen vaccination. The level of one or more antigens encoded by a gene listed in Table 4 having a positive value for r_in_PROSTVAC Progression-free survival is determined by assaying the level of one or more antigens in a sample from a prostate cancer patient. The level of the one or more antigens from the sample is compared with an average level of the one or more antigens for a group of patients with prostate cancer. A determination is made that the therapy is effective if the level of the one or more antigens in the patient is greater than the average level of the one or more antigens in the group of patients with prostate cancer.

[0063] The therapy may include one or more of Ipilimumab administration, prostate antigen vaccination, and PROSTVAC therapy.

[0064] In another aspect is provided a method of identifying and treating a prostate cancer patient previously treated with PROSTVAC vaccination or prostate antigen vaccination. The level of one or more antigens encoded by a gene listed in Table 4 having a positive value for r_in_PROSTVAC Progression-free survival is determined by assaying the level of one or more antigens in a sample from a prostate cancer patient. The level of the one or more antigens is compared with an average level of the one or more antigens for a group of patients with prostate cancer. The therapy or the vaccination with a prostate antigen is administered if the level of the one or more antigens in the patient is greater than the average level of the one or more antigens in the group of patients with prostate cancer

[0065] In some embodiments, the administered therapy comprises one or more of Ipilimumab administration, prostate antigen vaccination, and PROSTVAC therapy.

[0066] In another aspect is provided a method of identifying and treating a prostate cancer patient previously treated with PROSTVAC vaccination or prostate antigen vaccination. The level of one or more antigens encoded by a gene listed in Table 4 having a negative value for r_in_PROSTVAC Progression-free survival is determined by assaying the level of one or more antigens in a sample from a prostate cancer patient. The level of the one or more antigens from the prostate cancer patient is compared with an average level of the one or more antigens for a group of patients with prostate cancer. Therapy is administered if the level of the one or more antigens in the patient is less than the average level of the one or more antigens in the group of patients with prostate cancer.

[0067] In some embodiments, the therapy comprises one or more of Ipilimumab administration, prostate antigen vaccination, and PROSTVAC therapy.

[0068] In some embodiments, the patient also has an increased level of one or more antigens encoded by a gene listed in Table 4 having a positive value for r_in_PROSTVAC Progression-free survival as compared to the level in the group of patients with prostate cancer.

[0069] In another aspect is provided a method of monitoring the effectiveness of PROSTVAC therapy in a prostate cancer patient previously treated with PROSTVAC therapy or vaccination with a prostate antigen. The level of one or more antigens encoded by a gene listed in Table 4 having a negative value for r_in_PROSTVAC Progression-free survival is determined by assaying the level of one or more antigens in a sample from a prostate cancer patient. The level of the one or more antigens from the prostate cancer patient is compared with an average level of the one or more antigens for a group of patients with prostate cancer. A determination is made that the PROSTVAC therapy is effective if the level of the one or more antigens in the patient is less than the average level of the one or more antigens in the group of patients with prostate cancer.

[0070] In another aspect is provided a method of monitoring the effectiveness of PROSTVAC therapy in a prostate cancer patient previously treated with PROSTVAC therapy or vaccination with a prostate antigen. The level of one or more antigens encoded by a gene listed in Table 4 having a positive value for r_in_PROSTVAC Progression-free survival is determined by assaying the level of one or more antigens in a sample from a prostate cancer patient. The level of the one or more antigens in the prostate cancer patient is compared with an average level of the one or more antigens for a group of patients with prostate cancer. A determination is made that the PROSTVAC therapy is effective if the level of the one or more antigens in the patient is greater than the average level of the one or more antigens in the group of patients with prostate cancer.

[0071] In another aspect is provided a method of assessing overall survival of a patient who has been treated with PROSTVAC. The level of one or more antigens encoded by a gene listed in Table 5 having a positive value for r_in_Prostvac Overall Survival is determined by assaying the level of one or more antigens in a sample from a prostate cancer patient. The level of the one or more antigens is compared with an average level of the one or more antigens for a group of patients with prostate cancer.

[0072] In another aspect is provided a method of monitoring the effectiveness of combined PROSTVAC with Ipilimumab therapy in a prostate cancer patient previously treated with combined PROSTVAC with Ipilimumab therapy. The level of one or more antigens encoded by a gene listed in Table 6 having a positive value for r-value Study.Day is determined by assaying the level of one or more antigens in a sample from a prostate cancer patient. The level of the one or more antigens is compared with an average level of the one or more antigens for a group of patients with prostate cancer. The combined PROSTVAC with Ipilimumab therapy is determined to be effective if the level of the one or more antigens in the patient is greater than the average level of the one or more antigens in the group of patients with prostate cancer.

[0073] In yet another aspect is provided a method of monitoring the effectiveness of combined PROSTVAC with Ipilimumab therapy in a prostate cancer patient previously treated with combined PROSTVAC with Ipilimumab therapy. The level of one or more antigens encoded by a gene listed in Table 7 having a positive value for r_in_prostvac_ipi_Best.Response is determined by assaying the level of one or more antigens in a sample from a prostate cancer patient. The level of the one or more antigens is compared with an average level of the one or more antigens for a group of patients with prostate cancer. The combined PROSTVAC with Ipilimumab therapy is determined effective if the level of the one or more antigens in the patient is greater than the average level of the one or more antigens in the group of patients with prostate cancer.

[0074] In another aspect is provided a method of assessing overall survival of a patient who has been treated with PROSTVAC and Ipilimumab. The level of one or more antigens encoded by a gene listed in Table 8 having a positive value for r_in_prostvac_ipi_Overall.Survival is determined by assaying the level of one or more antigens in a sample from a prostate cancer patient. The level of the one or more antigens is compared with an average level of the one or more antigens for a group of patients with prostate cancer.

[0075] In another aspect is provided a method of monitoring for immune-related adverse events arising from combined PROSTVAC with Ipilimumab therapy in a prostate cancer patient previously treated with combined PROSTVAC with Ipilimumab therapy. The level of one or more antigens encoded by a gene listed in Table 9 having a positive value for Pearson'r is determined by assaying the level of one or more antigens in a sample from a prostate cancer patient. The level of the one or more antigens is compared with an average level of the one or more antigens for a group of patients with prostate cancer. A determination that there is risk for an immune-related adverse event arising from combined PROSTVAC with Ipilimumab therapy is made if the level of the one or more antigens in the patient is greater than the average level of the one or more antigens in the group of patients with prostate cancer.

[0076] The present invention is not to be limited in scope by the specific embodiments described herein. Indeed, various modifications of the invention in addition to those described herein will become apparent to those skilled in the art from the foregoing description and the accompanying figures. Such modifications are intended to fall within the scope of the appended claims. It is further to be understood that all values are approximate, and are provided for description.

[0077] Patents, patent applications, publications, product descriptions, and protocols are cited throughout this application, the disclosures of which are incorporated herein by reference in their entireties for all purposes.

### EXAMPLE 1

### Production of Recombinant Autoantigens

[0078] Recombinant antigens were produced in Escherichia coli. Five cDNA libraries originating from different human tissues (fetal brain, colon, lung, liver, CD4 induced and non-induced T cells) were used for the recombinant production of human antigens. All of these cDNA libraries were oligo(dT)-primed, containing the coding region for an N-terminally located hexa-histidine-tag and were under transcriptional control of the lactose inducible promoter from E. coli]. Sequence integrity of the cDNA libraries was confirmed by 5′ DNA sequencing. Additionally, expression clones representing the full-length sequence derived from the human ORFeome collection were included. Individual antigens were designed in silico, synthesized chemically (Life Technologies, Carlsbad, USA) and cloned into the expression vector pQE30-NST fused to the coding region for the N-terminal-located His6-tag. Of the antigens. Recombinant gene expression was performed in E. coli SCS1 cells carrying plasmid pSE111 for improved expression of human genes. Cells were cultivated in 200 ml auto-induction medium (Overnight Express auto-induction medium, Merck, Darmstadt, Germany) overnight and harvested by centrifugation. Bacterial pellets were lysed by resuspension in 15 ml lysis buffer (6 M guanidinium-HCl, 0.1 M NaH2PO4, 0.01 M Tris-HCl, pH 8.0).

[0079] Soluble proteins were affinity-purified after binding to Protino® Ni-IDA 1000 Funnel Column (Macherey-Nagel, Duren, Germany). Columns were washed with 8 ml washing buffer (8 M urea, 0.1 M NaH2PO4, 0.01 M Tris-HCl, pH 6.3). Proteins were eluted in 3 ml elution buffer (6 M urea, 0.1 M NaH2PO4, 0.01 M Tris-HCl, 0.5% (w/v) trehalose pH 4.5). Each protein preparation was transferred into 2D-barcoded tubes, lyophilized and stored at −20° C.

### EXAMPLE 2

### Selection of Antigens and Design of the Cancer Screen

[0080] Candidate antigens were selected for this cancer screen to cover immune-related processes and autoimmune disease antigens, cancer signaling processes, and antigens preferentially expressed in different cancer types. In total, 842 potential antigens were selected.

[0081] FIG. 1 shows the number of antigens per category.

### EXAMPLE 3

### Coupling of Antigens to Beads

[0082] For the production of bead-based arrays (BBA), the proteins were coupled to magnetic carboxylated color-coded beads (MagPlex™ microspheres, Luminex Corporation, Austin, Tex., USA). The manufacturer's protocol for coupling proteins to MagPlexm microspheres was adapted to use liquid handling systems. A semi-automated coupling procedure of one BBA encompassed 384 single, separate coupling reactions, which were carried out in four 96-well plates. For each single coupling reaction, up to 12.5 μg antigen and 8.8×105 MagPlex™ beads of one color region (ID) were used. All liquid handling steps were carried out by either an eight-channel pipetting system (Starlet, Hamilton Robotics, Bonaduz, Switzerland) or a 96-channel pipetting system (Evo Freedom 150, Tecan, Mannderdorf, Switzerland). For semi-automated coupling, antigens were dissolved in H2O, and aliquots of 60 microliters were transferred from 2D barcode tubes to 96-well plates. MagPlex™ microspheres were homogeneously resuspended and each bead ID was transferred in one well of a 96-well plate. The 96-well plates containing the microspheres were placed on a magnetic separator (LifeSep™, Dexter Magnetic Technologies Inc., Elk Grove Village, USA) to sediment the beads for washing steps and on a microtiter plate shaker (MTS2/4, IKA) to facilitate permanent mixing for incubation steps.

[0083] For coupling, the microspheres were washed three times with activation buffer (100 mM NaH2PO4, pH 6.2) and resuspended in 120 μl activation buffer. To obtain reactive sulfo-NHS-ester intermediates, 15 μl 1-ethly-3-(3-dimethlyaminopropyl) carbodiimide (50 mg/ml) and 15 μl N-hydroxy-succinimide (50 mg/ml) were applied to microspheres. After 20 minutes incubation (900 rpm, room temperature (RT)) the microspheres were washed three times with coupling buffer (50 mM MES, pH 5.0) and resuspended in 65 μl coupling buffer. Immediately, 60 μl antigen solution was added to reactive microspheres and coupling took place over 120 minutes under permanent mixing (900 rpm, RT). After three wash cycles using washing buffer (PBS, 0.1% Tween20) coupled beads were resuspended in blocking buffer (PBS, 1% BSA, 0.05% ProClin300), incubated for 20 minutes (900 rpm, RT) and then transferred to be maintained at 4-8° C. for 12-72 h.

[0084] Finally, a multiplex BBA was produced by pooling 384 antigen-coupled beads.

### EXAMPLE 4

### Incubation of Serum Samples with Antigen-Coupled Beads

[0085] Serum samples were transferred to 2D barcode tubes and a 1:100 serum dilution was prepared with assay buffer (PBS, 0.5% BSA, 10% E. coli lysate, 50% Low-Cross buffer (Candor Technologies, Nurnberg, Germany)) in 96-well plates. The serum dilutions were first incubated for 20 minutes to neutralize any human IgG eventually directed against E. coli proteins. The BBA was sonicated for 5 minutes and the bead mix was distributed in 96-well plates. After three wash cycles with washing buffer (PBS, 0.05% Tween20) serum dilutions (50 μl) were added to the bead mix and incubated for 20 h (900 rpm, 4-8° C.). Supernatants were removed from the beads by three wash cycles, and secondary R-phycoerythrin-labeled antibody (5 μg/ml, goat anti-human, Dianova, Hamburg, Germany) was added for a final incubation of 45 minutes (900 rpm, RT). The beads were washed three times with washing buffer (PBS, 0.1% Tween20) and resuspended in 100 μl sheath fluid (Luminex Corporation). Subsequently, beads were analyzed in a FlexMap3D device for fluorescent signal readout (DD gate 7.500-15.000; sample size: 80 μl; 1000 events per bead ID; timeout 60 sec). The binding events were displayed as median fluorescence intensity (MFI). Measurements were disregarded when low numbers of bead events (<30 beads) were counted per bead ID.

### EXAMPLE 5

### Statistical Analysis

[0086] Data processing and analysis were performed using the programming language R (http://www.r-project.org/ version 3.3.0), KNIME 3.2 (https://www.knime.org/), DataWarrior (www.openmolecules.org/datawarrior), and tMeV 4.9 (http://www.tm4.org).

[0087] To identify autoantibodies that have higher reactivity to the test antigen in a group of patients compared to a control group, the permutation based statistical technique Significance of microarrays in the R-programming language (SAMR) was used (Tusher et al., 2001). The strength of differences between the two test groups is computed as SAMR score_d. A positive fold-change value is indicative of higher autoantibody reactivity in the cancer group compared to healthy control samples. Furthermore, receiver-operating characteristics were calculated to provide area under the curve (AUC) values for each antigen. The ROC curves were generated using the package pROC (Robin et al., 2011).

[0088] To identify biomarkers correlating with clinical response, overall survival, study day, or irAE the Pearson's correlation coefficient “r” was calculated.

[0089] To explore the data and to identify biomarkers that enable classification and prediction, partial least squares regression (PLS) was applied to the autoantibody (antigens) data set (Palermo et al., 2009). The orthogonal scores algorithm was used to perform the PLS regression using the programming language “R”. Results of PLS modeling were visualized as “biplots” of autoantibodies and demographic, study data and clinical data reflecting the study design. For each antigen coordinate, the distance to the origin indicates the variance in the reduced two-dimensional space. Antigens without variance would lie in the middle of the bi-plot. The identified autoantibody biomarkers were used as landmarks in the graphical representation of the multivariate model.

### EXAMPLE 6

### Identification and Measurement of Antibodies Targeting Tumor-Associated Antigens and Self-Antigens in Prostate Cancer Patients Treated with PROSTVAC

[0090] Serum samples from 24 prostate cancer patients treated with PROSTVAC cancer vaccine were tested for the presence of autoantibodies against 842 preselected antigens (Gulley et al., 2014). Samples were collected prior to treatment (T0 samples) and two timepoints during treatment. The T1 corresponds to 90 days (3 month) and the T2 samples corresponds to 180 days (6 month) The PROSTVAC regimen consists of an initial PSA-TRICOM vaccinia-based priming dose, followed by six subsequent PSA-TRICOM boosting doses. These seven injections are given within a 5-month treatment period. To enhance the immune response to weakly immunogenic autoantigens such as PSA, GM-CSF/CSF2 is given at the start of the therapy.

[0091] Table 1 includes all identified autoantibody reactivities and antigens.

[0092] Markers correlating with different clinical endpoints are extracted and shown in separate tables (T).

TABLE 1
List of all identified antigens

| | Gene | Gene Symbol and | | | | | | | | | |
|---|---|---|---|---|---|---|---|---|---|---|---|
| ID | ID | Antigen Sequence | Gene Name | Table 2 | Table 3 | Table 4 | Table 5 | Table 6 | Table 7 | Table 8 | Table 9 |
| 1 | 3620 | IDO1 (SEQ ID | indoleamine 2,3- | | | | 1 | | 1 | 1 | 1 |
| | | NO: 1) | dioxygenase 1 | | | | | | | | |
| 2 | 1437 | CSF2 (SEQ ID | colony stimulating | 1 | | 1 | 1 | 1 | | | |
| | | NO: 2) | factor 2 | | | | | | | | |
| | | | (granulocyte- | | | | | | | | |
| | | | macrophage) | | | | | | | | |
| 3 | 7408 | VASP (SEQ ID | vasodilator- | 1 | 1 | | | 1 | | | |
| | | NO: 3) | stimulated | | | | | | | | |
| | | | phosphoprotein | | | | | | | | |
| 4 | 1026 | CDKN1A (SEQ ID | cyclin-dependent | 1 | 1 | | | 1 | | | |
| | | NO: 4) | kinase inhibitor 1A | | | | | | | | |
| | | | (p21, Cip1) | | | | | | | | |
| 5 | 1655 | DDX5 (SEQ ID | DEAD (Asp-Glu-Ala- | 1 | | | 1 | | | 1 | |
| | | NO: 5) | Asp) box helicase 5 | | | | | | | | |
| 6 | 6638 | SNRPN (SEQ ID | small nuclear | | | 1 | | | | 1 | 1 |
| | | NO: 6) | ribonucleoprotein | | | | | | | | |
| | | | polypeptide N | | | | | | | | |
| 7 | 11315 | PARK7 (SEQ ID | parkinson protein 7 | 1 | | 1 | | | | | |
| | | NO: 7) | | | | | | | | | |
| 8 | 8503 | PIK3R3 (SEQ ID | phosphoinositide-3- | | | | | | 1 | 1 | 1 |
| | | NO: 8) | kinase, regulatory | | | | | | | | |
| | | | subunit 3 (gamma) | | | | | | | | |
| 9 | 10015 | PDCD6IP (SEQ ID | programmed cell | | | | | 1 | | 1 | 1 |
| | | NO: 9) | death 6 interacting | | | | | | | | |
| | | | protein | | | | | | | | |
| 10 | 3304 | HSPA1B (SEQ ID | heat shock 70 kDa | 1 | | | | | | | 1 |
| | | NO: 10) | protein 1B | | | | | | | | |
| 11 | 2931 | GSK3A (SEQ ID | glycogen synthase | 1 | 1 | | | | 1 | | |
| | | NO: 11) | kinase 3 alpha | | | | | | | | |
| 12 | 1027 | CDKN1B (SEQ ID | cyclin-dependent | 1 | | | | | | | 1 |
| | | NO: 12) | kinase inhibitor 1B | | | | | | | | |
| | | | (p27, Kip1) | | | | | | | | |
| 13 | 26022 | TMEM98 (SEQ ID | transmembrane | | | | | | | 1 | 1 |
| | | NO: 13) | protein 98 | | | | | | | | |
| 14 | 4171 | MCM2 (SEQ ID | minichromosome | 1 | | | | | | 1 | 1 |
| | | NO: 14) | maintenance complex | | | | | | | | |
| | | | component 2 | | | | | | | | |
| 15 | 6494 | SIPA1 (SEQ ID | signal-induced | 1 | | | | | | 1 | 1 |
| | | NO: 15) | proliferation- | | | | | | | | |
| | | | associated 1, | | | | | | | | |
| | | | minichromosome | | | | | | | | |
| | | | maintenance complex | | | | | | | | |
| | | | component 2 | | | | | | | | |
| 16 | 5137 | PDE1C (SEQ ID | phosphodiesterase | | | | 1 | | 1 | 1 | |
| | | NO: 16) | 1C, calmodulin- | | | | | | | | |
| | | | dependent 70 kDa | | | | | | | | |
| 17 | 4843 | NOS2 (SEQ ID | nitric oxide | | | | | | 1 | 1 | 1 |
| | | NO: 17) | synthase 2, | | | | | | | | |
| | | | inducible | | | | | | | | |
| 18 | 7299 | TYR (SEQ ID | tyrosinase | | | | | | 1 | 1 | 1 |
| | | NO: 18) | | | | | | | | | |
| 19 | 9240 | PNMA1 (SEQ ID | paraneoplastic Ma | 1 | | | | | 1 | | |
| | | NO: 19) | antigen 1 | | | | | | | | |
| 20 | 64326 | RFWD2 (SEQ ID | ring finger and WD | 1 | | | | | 1 | | 1 |
| | | NO: 20) | repeat domain 2, E3 | | | | | | | | |
| | | | ubiquitin protein | | | | | | | | |
| | | | ligase | | | | | | | | |
| 21 | 154 | ADRB2 (SEQ ID | adrenoceptor beta | | | | 1 | | | | 1 |
| | | NO: 21) | 2, surface | | | | | | | | |
| 22 | 5971 | RELB (SEQ ID | v-rel avian | | | | | | 1 | 1 | |
| | | NO: 22) | reticuloendotheliosis | | | | | | | | |
| | | | viral oncogene | | | | | | | | |
| | | | homolog B | | | | | | | | |
| 23 | 1493 | CTLA4 (SEQ ID | cytotoxic T- | 1 | | | | 1 | | | |
| | | NO: 23) | lymphocyte | | | | | | | | |
| | | | associated protein 4 | | | | | | | | |
| 24 | 9133 | CCNB2 (SEQ ID | cyclin B2 | | | | 1 | | | 1 | 1 |
| | | NO: 24) | | | | | | | | | |
| 25 | 4107 | MAGEA8 (SEQ ID | melanoma antigen | | | 1 | | | 1 | 1 | |
| | | NO: 25) | family A, 8 | | | | | | | | |
| 26 | 23151 | GRAMD4 (SEQ ID | GRAM domain | | 1 | 1 | | | | | |
| | | NO: 26) | containing 4 | | | | | | | | |
| 27 | 3123 | HLA-DRB1 (SEQ ID | major | | 1 | 1 | | | | | |
| | | NO: 27) | histocompatibility | | | | | | | | |
| | | | complex, class II, | | | | | | | | |
| | | | DR beta 1 | | | | | | | | |
| 28 | 5552 | SRGN (SEQ ID | serglycin | | | 1 | 1 | | | | |
| | | NO: 28) | | | | | | | | | |
| 29 | 6758 | SSX5 (SEQ ID | synovial sarcoma, X | | 1 | 1 | | | | | |
| | | NO: 29) | breakpoint 5 | | | | | | | | |
| 30 | 163 | AP2B1 (SEQ ID | adaptor-related | | 1 | 1 | | | | | |
| | | NO: 30) | protein complex 2, | | | | | | | | |
| | | | beta 1 subunit | | | | | | | | |
| 31 | 7520 | XRCC5 (SEQ ID | X-ray repair | | | 1 | 1 | | | | |
| | | NO: 31) | complementing | | | | | | | | |
| | | | defective repair in | | | | | | | | |
| | | | Chinese hamster | | | | | | | | |
| | | | cells 5 (double- | | | | | | | | |
| | | | strand-break | | | | | | | | |
| | | | rejoining) | | | | | | | | |
| 32 | 3554 | IL1R1 (SEQ ID | interleukin 1 | | | 1 | | | | | 1 |
| | | NO: 32) | receptor, type I | | | | | | | | |
| 33 | 6625 | SNRNP70 (SEQ ID | U1-snRNP 68/70 kDa | | | | | | 1 | 1 | |
| | | NO: 33) | | | | | | | | | |
| 34 | 1743 | DLST (SEQ ID | OGDC-E2 | | 1 | | | | | | |
| | | NO: 34) | | | | | | | | | |
| 35 | 1857 | DVL3 (SEQ ID | dishevelled segment | 1 | | | | | | | |
| | | NO: 35) | polarity protein 3 | | | | | | | | |
| 36 | 3280 | HES1 (SEQ ID | hes family bHLH | | | 1 | | 1 | | | |
| | | NO: 36) | transcription | | | | | | | | |
| | | | factor 1 | | | | | | | | |
| 37 | 5585 | PKN1 (SEQ ID | protein kinase N1 | | | 1 | 1 | | | | |
| | | NO: 37) | | | | | | | | | |
| 38 | 311 | ANXA11 (SEQ ID | annexin A11 | | | 1 | | | | | 1 |
| | | NO: 38) | | | | | | | | | |
| 39 | 3624 | INHBA (SEQ ID | inhibin, beta A | | | 1 | 1 | | | | |
| | | NO: 39) | | | | | | | | | |
| 40 | 208 | AKT2 (SEQ ID | v-akt murine | | 1 | 1 | | | | | |
| | | NO: 40) | thymoma viral | | | | | | | | |
| | | | oncogene homolog 2 | | | | | | | | |
| 41 | 1785 | DNM2 (SEQ ID | dynamin 2 | | | 1 | 1 | | | | |
| | | NO: 41) | | | | | | | | | |
| 42 | 729447 | GAGE2A (SEQ ID | G antigen 2A | | | | | 1 | | | |
| | | NO: 42) | | | | | | | | | |
| 43 | 729408 | GAGE2D (SEQ ID | G antigen 2D | | | | | 1 | | | |
| | | NO: 43) | | | | | | | | | |
| 44 | 26749 | GAGE2E (SEQ ID | G antigen 2E | | | | | 1 | | | |
| | | NO: 44) | | | | | | | | | |
| 45 | 6195 | RPS6KA1 (SEQ ID | ribosomal protein | 1 | 1 | | | | | | |
| | | NO: 45) | S6 kinase, 90 kDa, | | | | | | | | |
| | | | polypeptide 1 | | | | | | | | |
| 46 | 273 | AMPH (SEQ ID | amphiphysin | | | | | | 1 | | 1 |
| | | NO: 46) | | | | | | | | | |
| 47 | 3397 | ID1 (SEQ ID | inhibitor of DNA | | | | | | 1 | 1 | |
| | | NO: 47) | binding 1, dominant | | | | | | | | |
| | | | negative helix- | | | | | | | | |
| | | | loop-helix protein | | | | | | | | |
| 48 | 3956 | LGALS1 (SEQ ID | lectin, | | 1 | | | 1 | | | |
| | | NO: 48) | galactoside- | | | | | | | | |
| | | | binding, soluble, 1 | | | | | | | | |
| 49 | 79155 | TNIP2 (SEQ ID | TNFAIP3 interacting | | | | 1 | | 1 | | |
| | | NO: 49) | protein 2 | | | | | | | | |
| 50 | 3305 | HSPA1L (SEQ ID | heat shock 70 kDa | | 1 | | | 1 | | | |
| | | NO: 50) | protein 1-like | | | | | | | | |
| 51 | 8320 | EOMES (SEQ ID | eomesodermin | 1 | | | | | 1 | | |
| | | NO: 51) | | | | | | | | | |
| 52 | 9173 | IL1RL1 (SEQ ID | interleukin 1 | | | | 1 | | | | 1 |
| | | NO: 52) | receptor-like 1 | | | | | | | | |
| 53 | 6624 | FSCN1 (SEQ ID | fascin actin- | | | | | | | 1 | 1 |
| | | NO: 53) | bundling protein 1 | | | | | | | | |
| 54 | 23646 | PLD3 (SEQ ID | phospholipase D | | | | | | 1 | 1 | |
| | | NO: 54) | family, member 3 | | | | | | | | |
| 55 | 491 | ATP2B2 (SEQ ID | ATPase, Ca++ | | 1 | | | | | 1 | |
| | | NO: 55) | transporting, | | | | | | | | |
| | | | plasma membrane 2 | | | | | | | | |
| 56 | 91807 | MYLK3 (SEQ ID | myosin light chain | 1 | | | | | | | |
| | | NO: 56) | kinase 3 | | | | | | | | |
| 57 | 30850 | CDR2L (SEQ ID | cerebellar | | | | | | 1 | 1 | |
| | | NO: 57) | degeneration- | | | | | | | | |
| | | | related protein 2- | | | | | | | | |
| | | | like | | | | | | | | |
| 58 | 4436 | MSH2 (SEQ ID | mutS homolog 2 | 1 | | | | | 1 | | |
| | | NO: 58) | | | | | | | | | |
| 59 | 1211 | CLTA (SEQ ID | clathrin, light | 1 | | | | | | | 1 |
| | | NO: 59) | chain A | | | | | | | | |
| 60 | 3312 | HSPA8 (SEQ ID | heat shock 70 kDa | 1 | | | | 1 | | | |
| | | NO: 60) | protein 8 | | | | | | | | |
| 61 | 9094 | UNC119 (SEQ ID | unc-119 homolog | | | | | | | | 1 |
| | | NO: 61) | (C. elegans) | | | | | | | | |
| 62 | 891 | CCNB1 (SEQ ID | cyclin B1 | 1 | | | | 1 | | | |
| | | NO: 62) | | | | | | | | | |
| 63 | 30848 | CTAG2 (SEQ ID | cancer/testis | | | | 1 | | 1 | | |
| | | NO: 63) | antigen 2 | | | | | | | | |
| 64 | 30848 | CTAG2 (SEQ ID | cancer/testis | | | | 1 | | 1 | | |
| | | NO: 64) | antigen 2 | | | | | | | | |
| 65 | 1387 | CREBBP (SEQ ID | CREB binding | | | | | | 1 | 1 | |
| | | NO: 65) | protein | | | | | | | | |
| 66 | 64763 | ZNF574 (SEQ ID | zinc finger protein | | | | | | 1 | 1 | |
| | | NO: 66) | 574 | | | | | | | | |
| 67 | 408 | ARRB1 (SEQ ID | arrestin, beta 1 | | | | | | | 1 | |
| | | NO: 67) | | | | | | | | | |
| 68 | 59067 | IL21 (SEQ ID | interleukin 21 | | | | | | 1 | | 1 |
| | | NO: 68) | | | | | | | | | |
| 69 | 2045 | EPHA7 (SEQ ID | EPH receptor A7 | | | | | | 1 | 1 | |
| | | NO: 69) | | | | | | | | | |
| 70 | 10411 | RAPGEF3 (SEQ ID | Rap guanine | 1 | | | 1 | | | | |
| | | NO: 70) | nucleotide exchange | | | | | | | | |
| | | | factor (GEF) 3 | | | | | | | | |
| 71 | 8517 | IKBKG (SEQ ID | inhibitor of kappa | | | | 1 | 1 | | | |
| | | NO: 71) | light polypeptide | | | | | | | | |
| | | | gene enhancer in B- | | | | | | | | |
| | | | cells, kinase gamma | | | | | | | | |
| 72 | 5223 | PGAM1 (SEQ ID | phosphoglycerate | | | | | | 1 | 1 | |
| | | NO: 72) | mutase 1 (brain) | | | | | | | | |
| 73 | 283431 | GAS2L3 (SEQ ID | growth arrest- | | | | | | 1 | 1 | |
| | | NO: 73) | specific 2 like 3 | | | | | | | | |
| 74 | 5937 | RBMS1 (SEQ ID | RNA binding motif, | | | | | | | 1 | 1 |
| | | NO: 74) | single stranded | | | | | | | | |
| | | | interacting protein 1 | | | | | | | | |
| 75 | 6181 | RPLP2 (SEQ ID | ribosomal protein, | | | | | | | 1 | 1 |
| | | NO: 75) | large, P2 | | | | | | | | |
| 76 | 130617 | ZFAND2B (SEQ ID | zinc finger, AN1- | 1 | | | | | | | 1 |
| | | NO: 76) | type domain 2B | | | | | | | | |
| 77 | 6749 | SSRP1 (SEQ ID | structure specific | | | | | | | | |
| | | NO: 77) | recognition protein 1 | | | | | | | | |
| 78 | 841 | CASP8 (SEQ ID | caspase 8, | 1 | | | 1 | | | | |
| | | NO: 78) | apoptosis-related | | | | | | | | |
| | | | cysteine peptidase | | | | | | | | |
| 79 | 843 | CASP10 (SEQ ID | caspase 10, | | | | 1 | | | | |
| | | NO: 79) | apoptosis-related | | | | | | | | |
| | | | cysteine peptidase | | | | | | | | |
| 80 | 3908 | LAMA2 (SEQ ID | laminin, alpha 2 | | | | | | | 1 | 1 |
| | | NO: 80) | | | | | | | | | |
| 81 | 310 | ANXA7 (SEQ ID | annexin A7 | | 1 | | | | | | 1 |
| | | NO: 81) | | | | | | | | | |
| 82 | 1060 | CENPC (SEQ ID | centromere protein | | | | | | 1 | 1 | |
| | | NO: 82) | C | | | | | | | | |
| 83 | 3161 | HMMR (SEQ ID | hyaluronan-mediated | | | | | | 1 | 1 | |
| | | NO: 83) | motility receptor | | | | | | | | |
| | | | (RHAMM) | | | | | | | | |
| 84 | 283748 | PLA2G4D (SEQ ID | phospholipase A2, | | | | | | 1 | 1 | |
| | | NO: 84) | group IVD | | | | | | | | |
| | | | (cytosolic) | | | | | | | | |
| 85 | 8490 | RGS5 (SEQ ID | regulator of G- | | | | 1 | | 1 | | |
| | | NO: 85) | protein signaling 5 | | | | | | | | |
| 86 | 9275 | BCL7B (SEQ ID | B-cell CLL/lymphoma | 1 | | | 1 | | | | |
| | | NO: 86) | 7B | | | | | | | | |
| 87 | 27179 | IL36A (SEQ ID | interleukin 36, | 1 | | | 1 | | | | |
| | | NO: 87) | alpha | | | | | | | | |
| 88 | 5906 | RAP1A (SEQ ID | RAP1A, member of | | | | | | 1 | | |
| | | NO: 88) | RAS oncogene family | | | | | | | | |
| 89 | 1 | A1BG (SEQ ID | alpha-1-B | | | | | | 1 | 1 | |
| | | NO: 89) | glycoprotein | | | | | | | | |
| 90 | 2316 | FLNA (SEQ ID | filamin A, alpha | 1 | | | | | | | |
| | | NO: 90) | | | | | | | | | |
| 91 | 6464 | SHC1 (SEQ ID | SHC (Src homology 2 | | | | | | 1 | 1 | |
| | | NO: 91) | domain containing) | | | | | | | | |
| | | | transforming | | | | | | | | |
| | | | protein 1 | | | | | | | | |
| 92 | 5705 | PSMC5 (SEQ ID | proteasome | | | | | | | | 1 |
| | | NO: 92) | (prosome, | | | | | | | | |
| | | | macropain) 26S | | | | | | | | |
| | | | subunit, ATPase, 5 | | | | | | | | |
| 93 | 4802 | NFYC (SEQ ID | nuclear | | | | | | | | 1 |
| | | NO: 93) | transcription | | | | | | | | |
| | | | factor Y, gamma | | | | | | | | |
| 94 | 10724 | MGEA5 (SEQ ID | meningioma | 1 | | | | | | | |
| | | NO: 94) | expressed antigen 5 | | | | | | | | |
| | | | (hyaluronidase) | | | | | | | | |
| 95 | 10285 | SMNDC1 (SEQ ID | survival motor | | | | | 1 | | | 1 |
| | | NO: 95) | neuron domain | | | | | | | | |
| | | | containing 1 | | | | | | | | |
| 96 | 10000 | AKT3 (SEQ ID | v-akt murine | | | | | | 1 | 1 | |
| | | NO: 96) | thymoma viral | | | | | | | | |
| | | | oncogene homolog 3 | | | | | | | | |
| 97 | 5801 | PTPRR (SEQ ID | protein tyrosine | | | | | | 1 | 1 | |
| | | NO: 97) | phosphatase, | | | | | | | | |
| | | | receptor type, R | | | | | | | | |
| 98 | 2099 | ESR1 (SEQ ID | estrogen receptor 1 | | | | | | 1 | 1 | |
| | | NO: 98) | | | | | | | | | |
| 99 | 4796 | TONSL (SEQ ID | tonsoku-like, DNA | 1 | | | | | | | |
| | | NO: 99) | repair protein | | | | | | | | |
| 100 | 6757 | SSX2 (SEQ ID | synovial sarcoma, X | | | 1 | | | | | |
| | | NO: 100) | breakpoint 2 | | | | | | | | |
| 101 | 2920 | CXCL2 (SEQ ID | chemokine (C-X-C | | | 1 | | | | | |
| | | NO: 101) | motif) ligand 2 | | | | | | | | |
| 102 | 23367 | LARP1 (SEQ ID | La | | | 1 | | | | | |
| | | NO: 102) | ribonucleoprotein | | | | | | | | |
| | | | domain family, | | | | | | | | |
| | | | member 1 | | | | | | | | |
| 103 | 2921 | CXCL3 (SEQ ID | chemokine (C-X-C | | | 1 | | | | | |
| | | NO: 103) | motif) ligand 3 | | | | | | | | |
| 104 | 4110 | MAGEA11 (SEQ ID | melanoma antigen | | | | | | | | |
| | | NO: 104) | family A, 11 | | | | | | | | |
| 105 | 6672 | Sp100 (SEQ ID | Sp100 | | | 1 | | | | | |
| | | NO: 105) | | | | | | | | | |
| 106 | 3959 | LGALS3BP (SEQ ID | lectin, | | | 1 | | | | | |
| | | NO: 106) | galactoside- | | | | | | | | |
| | | | binding, soluble, 3 | | | | | | | | |
| | | | binding protein | | | | | | | | |
| 107 | 1845 | DUSP3 (SEQ ID | dual specificity | | | 1 | | | | | |
| | | NO: 107) | phosphatase 3 | | | | | | | | |
| 108 | 1048 | CEACAM5 (SEQ ID | carcinoembryonic | | | 1 | | | | | |
| | | NO: 108) | antigen-related | | | | | | | | |
| | | | cell adhesion | | | | | | | | |
| | | | molecule 5 | | | | | | | | |
| 109 | 29115 | SAP30BP (SEQ ID | SAP30 binding | | | 1 | | | | | |
| | | NO: 109) | protein | | | | | | | | |
| 110 | 2633 | GBP1 (SEQ ID | guanylate binding | | | 1 | | | | | |
| | | NO: 110) | protein 1, | | | | | | | | |
| | | | interferon- | | | | | | | | |
| | | | inducible | | | | | | | | |
| 111 | 593 | BCKDHA (SEQ ID | branched chain keto | | | 1 | | | | | |
| | | NO: 111) | acid dehydrogenase | | | | | | | | |
| | | | E1, alpha | | | | | | | | |
| | | | polypeptide | | | | | | | | |
| 112 | 2335 | FN1 (SEQ ID | fibronectin 1 | | | 1 | | | | | |
| | | NO: 112) | | | | | | | | | |
| 113 | 3002 | GZMB (SEQ ID | granzyme B | | | 1 | | | | | |
| | | NO: 113) | (granzyme 2, | | | | | | | | |
| | | | cytotoxic T- | | | | | | | | |
| | | | lymphocyte- | | | | | | | | |
| | | | associated serine | | | | | | | | |
| | | | esterase 1) | | | | | | | | |
| 114 | 140462 | ASB9 (SEQ ID | ankyrin repeat and | | | 1 | | | | | |
| | | NO: 114) | SOCS box containing 9 | | | | | | | | |
| 115 | 7157 | TP53 (SEQ ID | tumor protein p53 | | | 1 | | | | | |
| | | NO: 115) | | | | | | | | | |
| 116 | 4001 | LMNB1 (SEQ ID | lamin B1 | | | 1 | | | | | |
| | | NO: 116) | | | | | | | | | |
| 117 | 468 | ATF4 (SEQ ID | activating | | | 1 | | | | | |
| | | NO: 117) | transcription | | | | | | | | |
| | | | factor 4 | | | | | | | | |
| 118 | 2288 | FKBP4 (SEQ ID | FK506 binding | | | 1 | | | | | |
| | | NO: 118) | protein 4, 59 kDa | | | | | | | | |
| 119 | 5533 | PPP3CC (SEQ ID | protein phosphatase | | | 1 | | | | | |
| | | NO: 119) | 3, catalytic | | | | | | | | |
| | | | subunit, gamma | | | | | | | | |
| | | | isozyme | | | | | | | | |
| 120 | 2157 | F8 (SEQ ID | coagulation factor | | | 1 | | | | | |
| | | NO: 120) | VIII, procoagulant | | | | | | | | |
| | | | component | | | | | | | | |
| 121 | 57568 | SIPA1L2 (SEQ ID | signal-induced | | | 1 | | | | | |
| | | NO: 121) | proliferation- | | | | | | | | |
| | | | associated 1 like 2 | | | | | | | | |
| 122 | 23256 | SCFD1 (SEQ ID | sec1 family domain | | | 1 | | | | | |
| | | NO: 122) | containing 1 | | | | | | | | |
| 123 | 55827 | DCAF6 (SEQ ID | DDB1 and CUL4 | | | 1 | | | | | |
| | | NO: 123) | associated factor 6 | | | | | | | | |
| 124 | 60560 | NAA35 (SEQ ID | N(alpha)- | | | | | | | | 1 |
| | | NO: 124) | acetyltransferase | | | | | | | | |
| | | | 35, NatC auxiliary | | | | | | | | |
| | | | subunit | | | | | | | | |
| 125 | 1457 | CSNK2A1 (SEQ ID | casein kinase 2, | | | | | | | | |
| | | NO: 125) | alpha 1 polypeptide | | | | | | | | |
| 126 | 2919 | CXCL1 (SEQ ID | chemokine (C-X-C | | | | | | | 1 | |
| | | NO: 126) | motif) ligand 1 | | | | | | | | |
| | | | (melanoma growth | | | | | | | | |
| | | | stimulating | | | | | | | | |
| | | | activity, alpha) | | | | | | | | |
| 127 | 27332 | ZNF638 (SEQ ID | zinc finger protein | | 1 | | | | | | |
| | | NO: 127) | 638 | | | | | | | | |
| 128 | 5034 | P4HB (SEQ ID | prolyl 4- | | | | | | | | 1 |
| | | NO: 128) | hydroxylase, beta | | | | | | | | |
| | | | polypeptide | | | | | | | | |
| 129 | 8648 | NCOA1 (SEQ ID | nuclear receptor | | | | 1 | | | | |
| | | NO: 129) | coactivator 1 | | | | | | | | |
| 130 | 7157 | TP53 (SEQ ID | tumor protein p53 | | | 1 | | | | | |
| | | NO: 130) | | | | | | | | | |
| 131 | 1487 | CTBP1 (SEQ ID | C-terminal binding | | | | | | | | 1 |
| | | NO: 131) | protein 1 | | | | | | | | |
| 132 | 1639 | DCTN1 (SEQ ID | dynactin 1 | | | | | 1 | | | |
| | | NO: 132) | | | | | | | | | |
| 133 | 5493 | PPL (SEQ ID | periplakin | | 1 | | | | | | |
| | | NO: 133) | | | | | | | | | |
| 134 | 5957 | RCVRN (SEQ ID | recoverin | | | | | 1 | | | |
| | | NO: 134) | | | | | | | | | |
| 135 | 2266 | FGG (SEQ ID | fibrinogen gamma | | | | 1 | | | | |
| | | NO: 135) | chain | | | | | | | | |
| 136 | 10818 | FRS2 (SEQ ID | fibroblast growth | 1 | | | | | | | |
| | | NO: 136) | factor receptor | | | | | | | | |
| | | | substrate 2 | | | | | | | | |
| 137 | 3306 | HSPA2 (SEQ ID | heat shock 70 kDa | | | | | 1 | | | |
| | | NO: 137) | protein 2 | | | | | | | | |
| 138 | 83593 | RASSF5 (SEQ ID | Ras association | | | 1 | | | | | |
| | | NO: 138) | (RalGDS/AF-6) | | | | | | | | |
| | | | domain family | | | | | | | | |
| | | | member 5 | | | | | | | | |
| 139 | 9909 | DENND4B (SEQ ID | DENN/MADD domain | | | 1 | | | | | |
| | | NO: 139) | containing 4B | | | | | | | | |
| 140 | 1390 | CREM (SEQ ID | cAMP responsive | | | 1 | | | | | |
| | | NO: 140) | element modulator | | | | | | | | |
| 141 | 2934 | GSN (SEQ ID | gelsolin | | | | | | | | 1 |
| | | NO: 141) | | | | | | | | | |
| 142 | 5934 | RBL2 (SEQ ID | retinoblastoma-like | | | | | | 1 | | |
| | | NO: 142) | 2 | | | | | | | | |
| 143 | 3611 | ILK (SEQ ID | integrin-linked | | | | | | 1 | | |
| | | NO: 143) | kinase | | | | | | | | |
| 144 | 672 | BRCA1 (SEQ ID | breast cancer 1, | | | | | | | | 1 |
| | | NO: 144) | early onset | | | | | | | | |
| 145 | 3566 | IL4R (SEQ ID | interleukin 4 | | | | 1 | | | | |
| | | NO: 145) | receptor | | | | | | | | |
| 146 | 6374 | CXCL5 (SEQ ID | chemokine (C-X-C | | 1 | | | | | | |
| | | NO: 146) | motif) ligand 5 | | | | | | | | |
| 147 | 30011 | SH3KBP1 (SEQ ID | SH3-domain kinase | | | | | | | | 1 |
| | | NO: 147) | binding protein 1 | | | | | | | | |
| 148 | 26037 | SIPA1L1 (SEQ ID | signal-induced | | | | | | | | 1 |
| | | NO: 148) | proliferation- | | | | | | | | |
| | | | associated 1 like 1 | | | | | | | | |
| 149 | 7791 | ZYX (SEQ ID | zyxin | | | | | | | | |
| | | NO: 149) | | | | | | | | | |
| 150 | 29968 | PSAT1 (SEQ ID | phosphoserine | | | | 1 | | | | |
| | | NO: 150) | aminotransferase 1 | | | | | | | | |
| 151 | 4088 | SMAD3 (SEQ ID | SMAD family member | | | | | | | 1 | |
| | | NO: 151) | 3 | | | | | | | | |
| 152 | 10454 | TAB1 (SEQ ID | TGF-beta activated | 1 | | | | | | | |
| | | NO: 152) | kinase 1/MAP3K7 | | | | | | | | |
| | | | binding protein 1 | | | | | | | | |
| 153 | 65264 | UBE2Z (SEQ ID | ubiquitin- | | | | | | 1 | | |
| | | NO: 153) | conjugating enzyme | | | | | | | | |
| | | | E2Z | | | | | | | | |
| 154 | 8971 | H1FX (SEQ ID | H1 histone family, | | | | 1 | | | | |
| | | NO: 154) | member X | | | | | | | | |
| 155 | 7494 | XBP1 (SEQ ID | X-box binding | | | | | 1 | | | |
| | | NO: 155) | protein 1 | | | | | | | | |
| 156 | 629 | CFB (SEQ ID | complement factor B | | | | 1 | | | | |
| | | NO: 156) | | | | | | | | | |
| 157 | 1287 | COL4A5 (SEQ ID | collagen, type IV, | | | | | | 1 | | |
| | | NO: 157) | alpha 5 | | | | | | | | |
| 158 | 307 | ANXA4 (SEQ ID | annexin A4 | | 1 | | | | | | |
| | | NO: 158) | | | | | | | | | |
| 159 | 23299 | BICD2 (SEQ ID | bicaudal D homolog | | | | | | | | 1 |
| | | NO: 159) | 2 (Drosophila) | | | | | | | | |
| 160 | 10718 | NRG3 (SEQ ID | neuregulin 3 | | | | | | | | 1 |
| | | NO: 160) | | | | | | | | | |
| 161 | 25865 | PRKD2 (SEQ ID | protein kinase D2 | | | | 1 | | | | |
| | | NO: 161) | | | | | | | | | |
| 162 | 10938 | EHD1 (SEQ ID | EH-domain | | | | | | | 1 | |
| | | NO: 162) | containing 1 | | | | | | | | |
| 163 | 1174 | AP1S1 (SEQ ID | adaptor-related | | | | | | | 1 | |
| | | NO: 163) | protein complex 1, | | | | | | | | |
| | | | sigma 1 subunit | | | | | | | | |
| 164 | 23032 | USP33 (SEQ ID | ubiquitin specific | | | | 1 | | | | |
| | | NO: 164) | peptidase 33 | | | | | | | | |
| 165 | 483 | ATP1B3 (SEQ ID | ATPase, Na+/K+ | | 1 | | | | | | |
| | | NO: 165) | transporting, beta | | | | | | | | |
| | | | 3 polypeptide | | | | | | | | |
| 166 | 2547; | XRCC6 (SEQ ID | Ku (p70, p80) | | | | | | | | |
| | 7520 | NO: 166); XRCC5 | | | | | | | | | |
| | | (SEQ ID NO: 167) | | | | | | | | | |
| 167 | 4069 | LYZ (SEQ ID | lysozyme | | | | | | | 1 | |
| | | NO: 168) | | | | | | | | | |
| 168 | 7343 | UBTF (SEQ ID | upstream binding | | | | 1 | | | | |
| | | NO: 169) | transcription | | | | | | | | |
| | | | factor, RNA | | | | | | | | |
| | | | polymerase I | | | | | | | | |
| 169 | 4000 | LMNA (SEQ ID | lamin A/C | | | | | | | 1 | |
| | | NO: 170) | | | | | | | | | |
| 170 | 80184 | CEP290 (SEQ ID | centrosomal protein | | | | | | | | 1 |
| | | NO: 171) | 290 kDa | | | | | | | | |
| 171 | 2870 | GRK6 (SEQ ID | G protein-coupled | | | | | | | 1 | |
| | | NO: 172) | receptor kinase 6 | | | | | | | | |
| 172 | 6434 | TRA2B (SEQ ID | transformer 2 beta | 1 | | | | | | | |
| | | NO: 173) | homolog | | | | | | | | |
| | | | (Drosophila) | | | | | | | | |
| 173 | 30827 | CXXC1 (SEQ ID | CXXC finger protein | | | | | 1 | | | |
| | | NO: 174) | 1 | | | | | | | | |
| 174 | 3146 | HMGB1 (SEQ ID | high mobility group | | | | 1 | | | | |
| | | NO: 175) | box 1 | | | | | | | | |
| 175 | 7167 | TPI1 (SEQ ID | triosephosphate | | | | | 1 | | | |
| | | NO: 176) | isomerase 1 | | | | | | | | |
| 176 | 80184 | CEP290 (SEQ ID | centrosomal protein | | | | | | | 1 | |
| | | NO: 177) | 290 kDa | | | | | | | | |
| 177 | 23396 | PIP5K1C (SEQ ID | phosphatidylinositol- | | | | 1 | | | | |
| | | NO: 178) | 4-phosphate 5- | | | | | | | | |
| | | | kinase, type I, | | | | | | | | |
| | | | gamma | | | | | | | | |
| 178 | 3875 | KRT18 (SEQ ID | keratin 18, type I | | | | | | | | 1 |
| | | NO: 179) | | | | | | | | | |
| 179 | 1938 | EEF2 (SEQ ID | eukaryotic | | | | | | 1 | | |
| | | NO: 180) | translation | | | | | | | | |
| | | | elongation factor 2 | | | | | | | | |
| 180 | 1938 | EEF2 (SEQ ID | eukaryotic | | | | | | 1 | | |
| | | NO: 180) | translation | | | | | | | | |
| | | | elongation factor 2 | | | | | | | | |
| 181 | 22994 | CEP131 (SEQ ID | centrosomal protein | | | | | | 1 | | |
| | | NO: 181) | 131 kDa | | | | | | | | |
| 182 | 80342 | TRAF3IP3 (SEQ ID | TRAF3 interacting | | | | 1 | | | | |
| | | NO: 182) | protein 3, - | | | | | | | | |
| 183 | 3728 | JUP (SEQ ID | junction | | | | | | 1 | | |
| | | NO: 183) | plakoglobin | | | | | | | | |
| 184 | 6242 | RTKN (SEQ ID | rhotekin, junction | | | | | | 1 | | |
| | | NO: 184) | plakoglobin | | | | | | | | |
| 185 | 90993 | CREB3L1 (SEQ ID | cAMP responsive | | | | | | | | 1 |
| | | NO: 185) | element binding | | | | | | | | |
| | | | protein 3-like 1 | | | | | | | | |
| 186 | 5657 | PRTN3 (SEQ ID | Proteinase (PR3; | | | | | | 1 | | |
| | | NO: 186) | non recombinant) | | | | | | | | |
| 187 | 7481 | WNT11 (SEQ ID | wingless-type MMTV | | | | | 1 | | | |
| | | NO: 187) | integration site | | | | | | | | |
| | | | family, member 11 | | | | | | | | |
| 188 | 922 | CD5L (SEQ ID | CD5 molecule-like | | | | | | | | 1 |
| | | NO: 188) | | | | | | | | | |
| 189 | 1001 | CDH3 (SEQ ID | cadherin 3, type 1, | | | | | | | | |
| | | NO: 189) | P-cadherin | | | | | | | | |
| | | | (placental) | | | | | | | | |
| 190 | 8190 | MIA (SEQ ID | melanoma inhibitory | | | | | | | | 1 |
| | | NO: 190) | activity | | | | | | | | |
| 191 | 4102 | MAGEA3 (SEQ ID | MAGE family member | | | | | 1 | | | |
| | | NO: 191) | A3 | | | | | | | | |
| 192 | 54472 | TOLLIP (SEQ ID | toll interacting | | 1 | | | | | | |
| | | NO: 192) | protein | | | | | | | | |
| 193 | 5175 | PECAM1 (SEQ ID | platelet/endothelial | | | | | | | | |
| | | NO: 193) | cell adhesion | | | | | | | | |
| | | | molecule 1 | | | | | | | | |
| 194 | 57402 | S100A14 (SEQ ID | S100 calcium | | | | | | | | 1 |
| | | NO: 194) | binding protein A14 | | | | | | | | |
| 195 | 9826 | ARHGEF11 (SEQ ID | Rho guanine | 1 | | | | | | | |
| | | NO: 195) | nucleotide exchange | | | | | | | | |
| | | | factor (GEF) 11 | | | | | | | | |
| 196 | 5455 | POU3F3 (SEQ ID | POU class 3 | | | | | | | 1 | |
| | | NO: 196) | homeobox 3 | | | | | | | | |
| 197 | 112950 | MED8 (SEQ ID | mediator complex | | | | | | | | 1 |
| | | NO: 197) | subunit 8 | | | | | | | | |
| 198 | 1191 | CLU (SEQ ID | clusterin | | | | | | | | 1 |
| | | NO: 198) | | | | | | | | | |
| 199 | 7276 | TTR (SEQ ID | transthyretin | | | | | | | | 1 |
| | | NO: 199) | | | | | | | | | |
| 200 | 4858 | NOVA2 (SEQ ID | neuro-oncological | | | | 1 | | | | |
| | | NO: 200) | ventral antigen 2 | | | | | | | | |
| 201 | 5868 | RAB5A (SEQ ID | RAB5A, member RAS | | | | | | | 1 | |
| | | NO: 201) | oncogene family | | | | | | | | |
| 202 | 1511 | CTSG (SEQ ID | cathepsin G, small | | | | | | | 1 | |
| | | NO: 202) | nuclear | | | | | | | | |
| | | | ribonucleoprotein | | | | | | | | |
| | | | D3 polypeptide | | | | | | | | |
| | | | 18 kDa | | | | | | | | |
| 203 | 6634 | SNRPD3 (SEQ ID | small nuclear | | | | | | | 1 | |
| | | NO: 203) | ribonucleoprotein | | | | | | | | |
| | | | D3 polypeptide | | | | | | | | |
| | | | 18 kDa | | | | | | | | |
| 204 | 11140 | CDC37 (SEQ ID | cell division cycle | | | | | | | 1 | |
| | | NO: 204) | 37 | | | | | | | | |
| 205 | 3586 | IL10 (SEQ ID | interleukin 10 | | | | | 1 | | | |
| | | NO: 205) | | | | | | | | | |
| 206 | 84419 | C15orf48 (SEQ ID | chromosome 15 open | | | | | | | 1 | |
| | | NO: 206) | reading frame 48 | | | | | | | | |
| 207 | 3125 | HLA-DRB3 (SEQ ID | major | | 1 | | | | | | |
| | | NO: 207) | histocompatibility | | | | | | | | |
| | | | complex, class II, | | | | | | | | |
| | | | DR beta 3 | | | | | | | | |
| 208 | 1485 | CTAG1B (SEQ ID | cancer/testis | | | | | | | 1 | |
| | | NO: 208) | antigen 1B | | | | | | | | |
| 209 | 1485 | CTAG1B (SEQ ID | cancer/testis | | | | | | | 1 | |
| | | NO: 209) | antigen 1B | | | | | | | | |
| 210 | 4282 | MIF (SEQ ID | macrophage | 1 | | | | | | | |
| | | NO: 210) | migration | | | | | | | | |
| | | | inhibitory factor | | | | | | | | |
| | | | (glycosylation- | | | | | | | | |
| | | | inhibiting factor) | | | | | | | | |
| 211 | 1297 | COL9A1 (SEQ ID | collagen, type IX, | | 1 | | | | | | |
| | | NO: 211) | alpha 1 | | | | | | | | |
| 212 | 5777 | PTPN6 (SEQ ID | protein tyrosine | 1 | | | | | | | |
| | | NO: 212) | phosphatase, non- | | | | | | | | |
| | | | receptor type 6 | | | | | | | | |
| 213 | 4793 | NFKBIB (SEQ ID | nuclear factor of | | | | | | | | 1 |
| | | NO: 213) | kappa light | | | | | | | | |
| | | | polypeptide gene | | | | | | | | |
| | | | enhancer in B-cells | | | | | | | | |
| | | | inhibitor, beta | | | | | | | | |
| 214 | 4137 | MAPT (SEQ ID | microtubule- | | | | | | 1 | | |
| | | NO: 214) | associated protein | | | | | | | | |
| | | | tau | | | | | | | | |
| 215 | 1509 | CTSD (SEQ ID | cathepsin D | | | | | | 1 | | |
| | | NO: 215) | | | | | | | | | |
| 216 | 1485 | CTAG1B (SEQ ID | cancer/testis | | | | | | | | |
| | | NO: 216) | antigen 1B | | | | | | | | |
| 217 | 1485 | CTAG1B (SEQ ID | cancer/testis | | | | | | | | |
| | | NO: 217) | antigen 1B | | | | | | | | |
| 218 | 201161 | CENPV (SEQ ID | centromere protein | | | | | | 1 | | |
| | | NO: 218) | V | | | | | | | | |
| 219 | 6117 | RPA1 (SEQ ID | replication protein | 1 | | | | | | | |
| | | NO: 219) | A1, 70 kDa | | | | | | | | |
| 220 | 4103 | MAGEA4 (SEQ ID | MAGE family member | | | | | | | | |
| | | NO: 220) | A4 | | | | | | | | |
| 221 | 10563 | CXCL13 (SEQ ID | chemokine (C-X-C | | 1 | | | | | | |
| | | NO: 221) | motif) ligand 13 | | | | | | | | |
| 222 | 6351 | CCL4 (SEQ ID | chemokine (C-C | | | | 1 | | | | |
| | | NO: 222) | motif) ligand 4 | | | | | | | | |
| 223 | 7417 | VDAC2 (SEQ ID | voltage-dependent | | | | 1 | | | | |
| | | NO: 223) | anion channel 2 | | | | | | | | |
| 224 | 10643 | IGF2BP3 (SEQ ID | insulin-like growth | 1 | | | | | | | |
| | | NO: 224) | factor 2 mRNA | | | | | | | | |
| | | | binding protein 3 | | | | | | | | |
| 225 | 994 | CDC25B (SEQ ID | cell division cycle | 1 | | | | | | | |
| | | NO: 225) | 25B | | | | | | | | |
| 226 | 9240 | PNMA1 (SEQ ID | paraneoplastic Ma | | | | | | | | 1 |
| | | NO: 226) | antigen 1 | | | | | | | | |
| 227 | 156 | GRK2 (SEQ ID | G protein-coupled | | | | 1 | | | | |
| | | NO: 227) | receptor kinase 2 | | | | | | | | |
| 228 | 10071 | MUC12 (SEQ ID | mucin 12, cell | | | | 1 | | | | |
| | | NO: 228) | surface associated | | | | | | | | |
| 229 | 3326 | HSP90AB1 (SEQ ID | heat shock protein | | | | 1 | | | | |
| | | NO: 229) | 90 kDa alpha | | | | | | | | |
| | | | (cytosolic), class | | | | | | | | |
| | | | B member 1 | | | | | | | | |
| 230 | 64806 | IL25 (SEQ ID | interleukin 25 | | | | | | | | 1 |
| | | NO: 230) | | | | | | | | | |
| 231 | 286514 | MAGEB18 (SEQ ID | melanoma antigen | | | | | | | | 1 |
| | | NO: 231) | family B, 18 | | | | | | | | |
| 232 | 4150 | MAZ (SEQ ID | MYC-associated zinc | | | | 1 | | | | |
| | | NO: 232) | finger protein | | | | | | | | |
| | | | (purine-binding | | | | | | | | |
| | | | transcription | | | | | | | | |
| | | | factor) | | | | | | | | |
| 233 | 5899 | RALB (SEQ ID | v-ral simian | | | | | | | | |
| | | NO: 233) | leukemia viral | | | | | | | | |
| | | | oncogene homolog B | | | | | | | | |
| | | | (ras related; GTP | | | | | | | | |
| | | | binding protein) | | | | | | | | |
| 234 | 7918 | GPANK1 (SEQ ID | G patch domain and | | | | | | | 1 | |
| | | NO: 234) | ankyrin repeats 1 | | | | | | | | |
| 235 | 80310 | PDGFD (SEQ ID | platelet derived | | | | | | 1 | | |
| | | NO: 235) | growth factor D | | | | | | | | |
| 236 | 2670 | GFAP (SEQ ID | glial fibrillary | | 1 | | | | | | |
| | | NO: 236) | acidic protein | | | | | | | | |
| 237 | 55801 | IL26 (SEQ ID | interleukin 26 | | | | | | | | 1 |
| | | NO: 237) | | | | | | | | | |
| 238 | 7001 | PRDX2 (SEQ ID | peroxiredoxin 2 | | | | | | | 1 | |
| | | NO: 238) | | | | | | | | | |
| 239 | 128866 | CHMP4B (SEQ ID | charged | | | | 1 | | | | |
| | | NO: 239) | multivesicular body | | | | | | | | |
| | | | protein 4B | | | | | | | | |
| 240 | 7204 | TRIO (SEQ ID | trio Rho guanine | | 1 | | | | | | |
| | | NO: 240) | nucleotide exchange | | | | | | | | |
| | | | factor | | | | | | | | |
| 241 | 7134 | TNNC1 (SEQ ID | troponin C type 1 | | 1 | | | | | | |
| | | NO: 241) | (slow) | | | | | | | | |
| 242 | 652 | BMP4 (SEQ ID | bone morphogenetic | 1 | | | | | | | |
| | | NO: 242) | protein 4 | | | | | | | | |
| 243 | 203286 | ANKS6 (SEQ ID | ankyrin repeat and | | | | | | 1 | | |
| | | NO: 243) | sterile alpha motif | | | | | | | | |
| | | | domain containing 6 | | | | | | | | |
| 244 | 5529 | PPP2R5E (SEQ ID | protein phosphatase | | | | 1 | | | | |
| | | NO: 244) | 2, regulatory | | | | | | | | |
| | | | subunit B′, epsilon | | | | | | | | |
| | | | isoform | | | | | | | | |
| 245 | 1398 | CRK (SEQ ID | v-crk avian sarcoma | 1 | | | | | | | |
| | | NO: 245) | virus CT10 oncogene | | | | | | | | |
| | | | homolog | | | | | | | | |
| 246 | 332 | BIRC5 (SEQ ID | baculoviral IAP | | | | 1 | | | | |
| | | NO: 246) | repeat containing 5 | | | | | | | | |
| 247 | 23400 | ATP13A2 (SEQ ID | ATPase type 13A2 | 1 | | | | | | | |
| | | NO: 247) | | | | | | | | | |
| 248 | 2617 | GARS (SEQ ID | glycyl-tRNA | | | | 1 | | | | |
| | | NO: 248) | synthetase | | | | | | | | |
| 249 | 60 | ACTB (SEQ ID | actin, beta | | | | | | | | 1 |
| | | NO: 249) | | | | | | | | | |
| 250 | 4302 | MLLT6 (SEQ ID | myeloid/lymphoid or | | | | | | | | 1 |
| | | NO: 250) | mixed-lineage | | | | | | | | |
| | | | leukemia (trithorax | | | | | | | | |
| | | | homolog, | | | | | | | | |
| | | | Drosophila); | | | | | | | | |
| | | | translocated to, 6, | | | | | | | | |
| | | | actin, beta | | | | | | | | |
| 251 | 79714 | CCDC51 (SEQ ID | coiled-coil domain | | | | 1 | | | | |
| | | NO: 251) | containing 51 | | | | | | | | |
| 252 | 5535 | PPP3R2 (SEQ ID | protein phosphatase | | | | 1 | | | | |
| | | NO: 252) | 3 (formerly 2B) | | | | | | | | |
| 253 | 5155 | PDGFB (SEQ ID | platelet-derived | | | | | | 1 | | |
| | | NO: 253) | growth factor beta | | | | | | | | |
| | | | polypeptide | | | | | | | | |
| 254 | 55703 | POLR3B (SEQ ID | polymerase (RNA) | | | | | | | | 1 |
| | | NO: 254) | III (DNA directed) | | | | | | | | |
| | | | polypeptide B | | | | | | | | |
| 255 | 3853 | KRT6A (SEQ ID | keratin 6A, type II | | | | | | | | 1 |
| | | NO: 255) | | | | | | | | | |
| 256 | 2885 | GRB2 (SEQ ID | growth factor | | | | | | | | 1 |
| | | NO: 256) | receptor-bound | | | | | | | | |
| | | | protein 2 | | | | | | | | |
| 257 | 1284 | COL4A2 (SEQ ID | collagen, type IV, | | | | | | | | 1 |
| | | NO: 257) | alpha 2 | | | | | | | | |
| 258 | 2572 | GAD2 (SEQ ID | glutamate | | 1 | | | | | | |
| | | NO: 258) | decarboxylase 2 | | | | | | | | |
| | | | (pancreatic islets | | | | | | | | |
| | | | and brain, 65 kDa) | | | | | | | | |
| 259 | 80705 | TSGA10 (SEQ ID | testis specific, 10 | | | | 1 | | | | |
| | | NO: 259) | | | | | | | | | |
| 260 | 9807 | IP6K1 (SEQ ID | inositol | | 1 | | | | | | |
| | | NO: 260) | hexakisphosphate | | | | | | | | |
| | | | kinase 1 | | | | | | | | |
| 261 | 1981 | EIF4G1 (SEQ ID | eukaryotic | | | | | 1 | | | |
| | | NO: 261) | translation | | | | | | | | |
| | | | initiation factor 4 | | | | | | | | |
| | | | gamma, 1 | | | | | | | | |
| 262 | 10290 | SPEG (SEQ ID | SPEG complex locus | | | | | | | | |
| | | NO: 262) | | | | | | | | | |
| 263 | 1991 | ELANE (SEQ ID | elastase, | | | | 1 | | | | |
| | | NO: 263) | neutrophil | | | | | | | | |
| | | | expressed | | | | | | | | |
| 264 | 5055 | SERPINB2 (SEQ ID | serpin peptidase | | | | | | 1 | | |
| | | NO: 264) | inhibitor, clade B | | | | | | | | |
| | | | (ovalbumin), member 2 | | | | | | | | |
| 265 | 3446 | IFNA10 (SEQ ID | interferon, alpha | | | | | | | | 1 |
| | | NO: 265) | 10 | | | | | | | | |
| 266 | 3441 | IFNA4 (SEQ ID | interferon, alpha 4 | | | | | | | | 1 |
| | | NO: 266) | | | | | | | | | |
| 267 | 80152 | CENPT (SEQ ID | centromere protein | | | | | | | 1 | |
| | | NO: 267) | T | | | | | | | | |
| 268 | 1107 | CHD3 (SEQ ID | chromodomain | | 1 | | | | | | |
| | | NO: 268) | helicase DNA | | | | | | | | |
| | | | binding protein 3 | | | | | | | | |
| 269 | 25824 | PRDX5 (SEQ ID | peroxiredoxin 5 | | | | 1 | | | | |
| | | NO: 269) | | | | | | | | | |
| 270 | 11214 | AKAP13 (SEQ ID | A kinase (PRKA) | | 1 | | | | | | |
| | | NO: 270) | anchor protein 13 | | | | | | | | |
| 271 | 6626 | SNRPA (SEQ ID | U1-snRNP A | | | | 1 | | | | |
| | | NO: 271) | | | | | | | | | |
| 272 | 1993 | ELAVL2 (SEQ ID | ELAV like neuron- | | 1 | | | | | | |
| | | NO: 272) | specific RNA | | | | | | | | |
| | | | binding protein 2 | | | | | | | | |
| 273 | 1995 | ELAVL3 (SEQ ID | ELAV like neuron- | | 1 | | | | | | |
| | | NO: 273) | specific RNA | | | | | | | | |
| | | | binding protein 3, | | | | | | | | |
| | | | ELAV like neuron- | | | | | | | | |
| | | | specific RNA | | | | | | | | |
| | | | binding protein 2 | | | | | | | | |
| 274 | 720 | C4A (SEQ ID | complement | | | | | | | | 1 |
| | | NO: 274) | component 4A | | | | | | | | |
| | | | (Rodgers blood | | | | | | | | |
| | | | group) | | | | | | | | |
| 275 | 56475 | RPRM (SEQ ID | reprimo, TP53 | | | | | | | | 1 |
| | | NO: 275) | dependent G2 arrest | | | | | | | | |
| | | | mediator candidate | | | | | | | | |
| 276 | 118430 | MUCL1 (SEQ ID | mucin-like 1 | | | | 1 | | | | |
| | | NO: 276) | | | | | | | | | |
| 277 | 84957 | RELT (SEQ ID | RELT tumor necrosis | | 1 | | | | | | |
| | | NO: 277) | factor receptor | | | | | | | | |
| 278 | 5025 | P2RX4 (SEQ ID | purinergic receptor | | | | | | | | 1 |
| | | NO: 278) | P2X, ligand gated | | | | | | | | |
| | | | ion channel, 4 | | | | | | | | |
| 279 | 3646 | EIF3E (SEQ ID | eukaryotic | | | | | | | 1 | |
| | | NO: 279) | translation | | | | | | | | |
| | | | initiation factor | | | | | | | | |
| | | | 3, subunit E | | | | | | | | |
| 280 | 4582 | MUC1 (SEQ ID | mucin 1, cell | | | | 1 | | | | |
| | | NO: 280) | surface associated | | | | | | | | |
| 281 | 84365 | NIFK (SEQ ID | nucleolar protein | | | | | | | 1 | |
| | | NO: 281) | interacting with | | | | | | | | |
| | | | the FHA domain of | | | | | | | | |
| | | | MKI67 | | | | | | | | |
| 282 | 3004 | GZMM (SEQ ID | granzyme M | | | | | | 1 | | |
| | | NO: 282) | (lymphocyte met-ase | | | | | | | | |
| | | | 1) | | | | | | | | |
| 283 | 2160 | F11 (SEQ ID | coagulation factor | | | | | | | | 1 |
| | | NO: 283) | XI | | | | | | | | |
| 284 | 174 | AFP (SEQ ID | alpha-fetoprotein | | | | | | | | 1 |
| | | NO: 284) | | | | | | | | | |
| 285 | 3662 | IRF4 (SEQ ID | interferon | | | | 1 | | | | |
| | | NO: 285) | regulatory factor 4 | | | | | | | | |
| 286 | 5337 | PLD1 (SEQ ID | phospholipase D1, | | | | | | | | 1 |
| | | NO: 286) | phosphatidylcholine- | | | | | | | | |
| | | | specific | | | | | | | | |
| 287 | 25930 | PTPN23(formerly: | protein tyrosine | | | | | | | 1 | |
| | | SRPR) (SEQ ID | phosphatase, non- | | | | | | | | |
| | | NO: 287) | receptor type 23 | | | | | | | | |
| 288 | 7419 | VDAC3 (SEQ ID | voltage-dependent | | | | | | | | 1 |
| | | NO: 288) | anion channel 3 | | | | | | | | |
| 289 | 5921 | RASA1 (SEQ ID | RAS p21 protein | | | | | | | | 1 |
| | | NO: 289) | activator (GTPase | | | | | | | | |
| | | | activating protein) 1 | | | | | | | | |
| 290 | 8027 | STAM (SEQ ID | signal transducing | | | | | | | | 1 |
| | | NO: 290) | adaptor molecule | | | | | | | | |
| | | | (SH3 domain and | | | | | | | | |
| | | | ITAM motif) 1 | | | | | | | | |
| 291 | 2064 | ERBB2 (SEQ ID | erb-b2 receptor | | | | 1 | | | | |
| | | NO: 291) | tyrosine kinase 2 | | | | | | | | |
| 292 | 29108 | PYCARD (SEQ ID | PYD and CARD domain | 1 | | | | | | | |
| | | NO: 292) | containing | | | | | | | | |
| 293 | 4241 | MELTF (formerly: | melanotransferrin | | | | | | 1 | | |
| | | MFI2) (SEQ ID | | | | | | | | | |
| | | NO: 293) | | | | | | | | | |
| 294 | 2243 | FGA (SEQ ID | fibrinogen alpha | | | | 1 | | | | |
| | | NO: 294) | chain | | | | | | | | |
| 295 | 257106 | ARHGAP30 (SEQ ID | Rho GTPase | | | | 1 | | | | |
| | | NO: 295) | activating protein | | | | | | | | |
| | | | 30 | | | | | | | | |
| 296 | 2185 | PTK2B (SEQ ID | protein tyrosine | 1 | | | | | | | |
| | | NO: 296) | kinase 2 beta | | | | | | | | |
| 297 | 4599 | MX1 (SEQ ID | MX dynamin-like | | | | | | | 1 | |
| | | NO: 297) | GTPase 1 | | | | | | | | |
| 298 | 9447 | AIM2 (SEQ ID | absent in melanoma | | 1 | | | | | | |
| | | NO: 298) | 2 | | | | | | | | |
| 299 | 165 | AEBP1 (SEQ ID | AE binding protein | | 1 | | | | | | |
| | | NO: 299) | 1 | | | | | | | | |
| 300 | 7917 | BAG6 (SEQ ID | BCL2-associated | | | | | | | | |
| | | NO: 300) | athanogene 6 | | | | | | | | |
| 301 | 4846 | NOS3 (SEQ ID | nitric oxide | | | | 1 | | | | |
| | | NO: 301) | synthase 3 | | | | | | | | |
| | | | (endothelial cell) | | | | | | | | |
| 302 | 655 | BMP7 (SEQ ID | bone morphogenetic | | | | | | | 1 | |
| | | NO: 302) | protein 7, chordin | | | | | | | | |
| 303 | 8646 | CHRD (SEQ ID | chordin | | | | | | | 1 | |
| | | NO: 303) | | | | | | | | | |
| 304 | 27101 | CACYBP (SEQ ID | calcyclin binding | | | | 1 | | | | |
| | | NO: 304) | protein | | | | | | | | |
| 305 | 58498 | MYL7 (SEQ ID | myosin, light chain | | | | | | | 1 | |
| | | NO: 305) | 7, regulatory | | | | | | | | |
| 306 | 4286 | MITF (SEQ ID | microphthalmia- | | | | | | | | 1 |
| | | NO: 306) | associated | | | | | | | | |
| | | | transcription | | | | | | | | |
| | | | factor | | | | | | | | |
| 307 | 10537 | UBD (SEQ ID | ubiquitin D | | | | | | | | 1 |
| | | NO: 307) | | | | | | | | | |
| 308 | 312 | ANXA13 (SEQ ID | annexin A13 | | | | 1 | | | | |
| | | NO: 308) | | | | | | | | | |
| 309 | 3320 | HSP90AA1 (SEQ ID | heat shock protein | | | | | | | | 1 |
| | | NO: 309) | 90 kDa alpha | | | | | | | | |
| | | | (cytosolic), class | | | | | | | | |
| | | | A member 1 | | | | | | | | |
| 310 | 3960 | LGALS4 (SEQ ID | lectin, | | | | | | | 1 | |
| | | NO: 310) | galactoside- | | | | | | | | |
| | | | binding, soluble, 4 | | | | | | | | |
| 311 | 23135 | KDM6B (SEQ ID | lysine (K)-specific | | | | | | 1 | | |
| | | NO: 311) | demethylase 6B | | | | | | | | |
| 312 | 3181 | HNRNPA2B1 (SEQ ID | heterogeneous | | | | 1 | | | | |
| | | NO: 312) | nuclear | | | | | | | | |
| | | | ribonucleoprotein | | | | | | | | |
| | | | A2/B1 | | | | | | | | |
| 313 | 4869 | NPM1 (SEQ ID | nucleophosmin | 1 | | | | | | | |
| | | NO: 313) | (nucleolar | | | | | | | | |
| | | | phosphoprotein B23, | | | | | | | | |
| | | | numatrin) | | | | | | | | |
| 314 | 51135 | IRAK4 (SEQ ID | interleukin-1 | | | | | | | | 1 |
| | | NO: 314) | receptor-associated | | | | | | | | |
| | | | kinase 4 | | | | | | | | |
| 315 | 567 | B2M (SEQ ID | beta-2- | | | | | | | | 1 |
| | | NO: 315) | microglobulin | | | | | | | | |
| 316 | 1977 | EIF4E (SEQ ID | eukaryotic | | | | | | | 1 | |
| | | NO: 316) | translation | | | | | | | | |
| | | | initiation factor | | | | | | | | |
| | | | 4E | | | | | | | | |
| 317 | 6629 | SNRPB2 (SEQ ID | small nuclear | | | | | | 1 | | |
| | | NO: 317) | ribonucleoprotein | | | | | | | | |
| | | | polypeptide B2 | | | | | | | | |
| 318 | 708 | C1QBP (SEQ ID | complement | | | | 1 | | | | |
| | | NO: 318) | component 1, q | | | | | | | | |
| | | | subcomponent | | | | | | | | |
| | | | binding protein | | | | | | | | |
| 319 | 672 | BRCA1 (SEQ ID | breast cancer 1, | | | | 1 | | | | |
| | | NO: 319) | early onset | | | | | | | | |
| 320 | 3178 | HNRNPA1 (SEQ ID | heterogeneous | | | | 1 | | | | |
| | | NO: 320) | nuclear | | | | | | | | |
| | | | ribonucleoprotein | | | | | | | | |
| | | | A1 | | | | | | | | |
| 321 | 9506 | PAGE4 (SEQ ID | P antigen family, | | | | 1 | | | | |
| | | NO: 321) | member 4 (prostate | | | | | | | | |
| | | | associated) | | | | | | | | |
| 322 | 653220 | XAGE1B (SEQ ID | X antigen family, | | | | | | | | |
| | | NO: 322) | member 1B, X | | | | | | | | |
| | | | antigen family, | | | | | | | | |
| | | | member 1C, X | | | | | | | | |
| | | | antigen family, | | | | | | | | |
| | | | member 1E, X | | | | | | | | |
| | | | antigen family, | | | | | | | | |
| | | | member 1A | | | | | | | | |
| 323 | 653067 | XAGE1E (SEQ ID | X antigen family, | | | | | | | | |
| | | NO: 323) | member 1E | | | | | | | | |
| 324 | 3437 | IFIT3 (SEQ ID | interferon-induced | | | | | | | 1 | |
| | | NO: 324) | protein with | | | | | | | | |
| | | | tetratricopeptide | | | | | | | | |
| | | | repeats 3 | | | | | | | | |
| 325 | 29082 | CHMP4A (SEQ ID | charged | | | | | | | | 1 |
| | | NO: 325) | multivesicular body | | | | | | | | |
| | | | protein 4A | | | | | | | | |
| 326 | 10940 | POP1 (SEQ ID | processing of | | | | 1 | | | | |
| | | NO: 326) | precursor 1, | | | | | | | | |
| | | | ribonuclease P/MRP | | | | | | | | |
| | | | subunit | | | | | | | | |
| | | | (S. cerevisiae) | | | | | | | | |
| 327 | 6636 | SNRPF (SEQ ID | small nuclear | | | | | | | | 1 |
| | | NO: 327) | ribonucleoprotein | | | | | | | | |
| | | | polypeptide F | | | | | | | | |
| 328 | 3856 | KRT8 (SEQ ID | keratin 8, type II | | | | 1 | | | | |
| | | NO: 328) | | | | | | | | | |
| 329 | 801 | CALM1 (SEQ ID | calmodulin 1 | | | | | | | 1 | |
| | | NO: 329) | (phosphorylase | | | | | | | | |
| | | | kinase, delta) | | | | | | | | |
| 330 | 805 | CALM2 (SEQ ID | calmodulin 2 | | | | | | | 1 | |
| | | NO: 330) | (phosphorylase | | | | | | | | |
| | | | kinase, delta), | | | | | | | | |
| | | | calmodulin 1 | | | | | | | | |
| | | | (phosphorylase | | | | | | | | |
| | | | kinase, delta) | | | | | | | | |
| 331 | 6786 | STIM1 (SEQ ID | stromal interaction | | | | 1 | | | | |
| | | NO: 331) | molecule 1 | | | | | | | | |
| 332 | 81 | ACTN4 (SEQ ID | actinin, alpha 4 | 1 | | | | | | | |
| | | NO: 332) | | | | | | | | | |
| 333 | 6634 | SmD3 (SEQ ID | SmD3 | | | | | | | 1 | |
| | | NO: 333) | | | | | | | | | |
| 334 | 3710 | ITPR3 (SEQ ID | inositol 1,4,5- | | | | 1 | | | | |
| | | NO: 334) | trisphosphate | | | | | | | | |
| | | | receptor, type 3 | | | | | | | | |
| 335 | 115362 | GBP5 (SEQ ID | guanylate binding | | | | | | | | 1 |
| | | NO: 335) | protein 5 | | | | | | | | |
| 336 | 10573 | MRPL28 (SEQ ID | mitochondrial | | 1 | | | | | | |
| | | NO: 336) | ribosomal protein | | | | | | | | |
| | | | L28 | | | | | | | | |
| 337 | 10013 | HDAC6 (SEQ ID | histone deacetylase | | | | | | 1 | | |
| | | NO: 337) | 6 | | | | | | | | |
| 338 | 5105 | PCK1 (SEQ ID | phosphoenolpyruvate | | | | | | | | |
| | | NO: 338) | carboxykinase 1 | | | | | | | | |
| | | | (soluble) | | | | | | | | |
| 339 | 56300 | IL36G (SEQ ID | interleukin 36, | | 1 | | | | | | |
| | | NO: 339) | gamma | | | | | | | | |
| 340 | 598 | BCL2L1 (SEQ ID | BCL2-like 1 | | | | | | 1 | | |
| | | NO: 340) | | | | | | | | | |
| 341 | 3854 | KRT6B (SEQ ID | keratin 6B, type II | | | | | | | | 1 |
| | | NO: 341) | | | | | | | | | |
| 342 | 3880 | KRT19 (SEQ ID | keratin 19, type I | | | | | | | | |
| | | NO: 342) | | | | | | | | | |
| 343 | 6280 | S100A9 (SEQ ID | S100 calcium | | | | | | | | |
| | | NO: 343) | binding protein A9 | | | | | | | | |
| 344 | 3075 | CFH (SEQ ID | complement factor H | | | | | | | | 1 |
| | | NO: 344) | | | | | | | | | |
| 345 | 9470 | EIF4E2 (SEQ ID | eukaryotic | | | | | | | | |
| | | NO: 345) | translation | | | | | | | | |
| | | | initiation factor | | | | | | | | |
| | | | 4E family member 2 | | | | | | | | |
| 346 | 2810 | SFN (SEQ ID | stratifin | 1 | | | | | | | |
| | | NO: 346) | | | | | | | | | |
| 347 | 79650 | USB1 (SEQ ID | U6 snRNA biogenesis | | 1 | | | | | | |
| | | NO: 347) | 1 | | | | | | | | |
| 348 | 9500 | MAGED1 (SEQ ID | melanoma antigen | | | | | | | | 1 |
| | | NO: 348) | family D, 1 | | | | | | | | |
| 349 | 84968 | PNMA6A (SEQ ID | paraneoplastic Ma | | | | | | 1 | | |
| | | NO: 349) | antigen family | | | | | | | | |
| | | | member 6A | | | | | | | | |
| 350 | 6382 | SDC1 (SEQ ID | syndecan 1 | 1 | | | | | | | |
| | | NO: 350) | | | | | | | | | |
| 351 | 26525 | IL36RN (SEQ ID | interleukin 36 | 1 | | | | | | | |
| | | NO: 351) | receptor antagonist | | | | | | | | |
| 352 | 6631 | SNRPC (SEQ ID | U1-snRNP C | | | | | | | 1 | |
| | | NO: 352) | | | | | | | | | |
| 353 | 3902 | LAG3 (SEQ ID | lymphocyte- | | | | | | | | 1 |
| | | NO: 353) | activation gene 3 | | | | | | | | |
| 354 | 23061 | TBC1D9B (SEQ ID | TBC1 domain family, | | | | | | 1 | | |
| | | NO: 354) | member 9B (with | | | | | | | | |
| | | | GRAM domain) | | | | | | | | |
| 355 | 6923 | ELOB (formerly: | elongin B | | | | | | | | 1 |
| | | TCEB2) (SEQ ID | | | | | | | | | |
| | | NO: 355) | | | | | | | | | |
| 356 | 10963 | STIP1 (SEQ ID | stress-induced | | | | 1 | | | | |
| | | NO: 356) | phosphoprotein 1 | | | | | | | | |
| 357 | 6175 | RPLP0 (SEQ ID | ribosomal protein, | 1 | | | | | | | |
| | | NO: 357) | large, P0 | | | | | | | | |
| 358 | 3606 | IL18 (SEQ ID | interleukin 18 | | | | | | | | 1 |
| | | NO: 358) | | | | | | | | | |
| 359 | 1629 | DBT (SEQ ID | dihydrolipoamide | | | | | | | | |
| | | NO: 359) | branched chain | | | | | | | | |
| | | | transacylase E2 | | | | | | | | |
| 360 | 7405 | UVRAG (SEQ ID | UV radiation | | | | | | | | 1 |
| | | NO: 360) | resistance | | | | | | | | |
| | | | associated | | | | | | | | |
| 361 | 5154 | PDGFA (SEQ ID | platelet-derived | | | | | | | | 1 |
| | | NO: 361) | growth factor alpha | | | | | | | | |
| | | | polypeptide | | | | | | | | |
| 362 | 79441 | HAUS3 (SEQ ID | HAUS augmin-like | | | | | | | | 1 |
| | | NO: 362) | complex, subunit 3 | | | | | | | | |
| 363 | 10492 | SYNCRIP (SEQ ID | synaptotagmin | | | | | | 1 | | |
| | | NO: 363) | binding, | | | | | | | | |
| | | | cytoplasmic RNA | | | | | | | | |
| | | | interacting protein | | | | | | | | |
| 364 | 8566 | PDXK (SEQ ID | pyridoxal | | | 1 | | | | | |
| | | NO: 364) | (pyridoxine, | | | | | | | | |
| | | | vitamin B6) kinase | | | | | | | | |
| 365 | 2260 | FGFR1 (SEQ ID | fibroblast growth | | | 1 | | | | | |
| | | NO: 365) | factor receptor 1 | | | | | | | | |
| 366 | 5834 | PYGB (SEQ ID | phosphorylase, | | | 1 | | | | | |
| | | NO: 366) | glycogen; brain | | | | | | | | |
| 367 | 7186 | TRAF2 (SEQ ID | TNF receptor- | | | 1 | | | | | |
| | | NO: 367) | associated factor 2 | | | | | | | | |
| 368 | 84444 | DOT1L (SEQ ID | DOT1-like histone | | | 1 | | | | | |
| | | NO: 368) | H3K79 | | | | | | | | |
| | | | methyltransferase | | | | | | | | |

[0093] The GeneID is found on NCBI website available at www.ncbi.nlm.nih.gov. More information about the gene can be found by accessing the NCBI website and entering the GeneID or Gene Symbol, for instance. The sequence listing provided with the application contains the sequences of the above-identified antigen sequences encoded by the gene identified by the corresponding “Gene ID”.

### EXAMPLE 7

### Identification of Tumor-Associated Antigens in Prostate Cancer Patients

[0094] A tumor-associated antigen (TAA) is defined as an antigenic substance produced in the tumor, vascular or tumor surrounding tissue, which triggers an immune response in the host. A higher autoantibody level against a TAA is useful to determine the immuno-competence of cancer patients before treating a patient with an immuno-oncology (IO) therapy. Furthermore, TAA expressed in tumor cells or surrounding tissue are potential targets for use in cancer therapy. A further use of TAA is to diagnose cancer patients.

[0095] Group 1 comprises the best 49 tumor-associated antigens identified in prostate cancer. Group 1 antigens were identified by comparing the autoantibody levels in prostate cancer patients and with those in healthy control patients. Markers were identified by using the statistical technique Significance of microarrays in the R-programming language (SAMR). The strength of differences between the two test groups is computed as SAMR score_d. A positive fold-change value is indicative of higher autoantibody reactivity in the cancer group compared to healthy control samples. Shown below in Table 2 are the data on 49 TAA which elicit an immune response in prostate cancer.

TABLE 2
TAA identified in prostate cancer
(PCa) compared to healthy controls.

| Neu Nr | Gene | Gene | SAMR_PCa vs | SAMR_PCA vs |
|---|---|---|---|---|
| Patent | ID | Symbol | HC_Score.d. | HC_Fold.Change |
| 4 | 1026 | CDKN1A | 6.92 | 4.94 |
| 2 | 1437 | CSF2 | 5.26 | 2.72 |
| 14 | 4171 | MCM2 | 4.52 | 2.70 |
| 15 | 6494 | SIPA1 | 4.52 | 2.70 |
| 23 | 1493 | CTLA4 | 4.48 | 1.54 |
| 3 | 7408 | VASP | 4.41 | 2.04 |
| 56 | 91807 | MYLK3 | 4.34 | 2.73 |
| 219 | 6117 | RPA1 | 4.30 | 1.89 |
| 7 | 11315 | PARK7 | 4.11 | 2.03 |
| 59 | 1211 | CLTA | 3.82 | 1.81 |
| 19 | 9240 | PNMA1 | 3.78 | 1.59 |
| 20 | 64326 | RFWD2 | 3.70 | 1.61 |
| 94 | 10724 | MGEA5 | 3.56 | 1.52 |
| 136 | 10818 | FRS2 | 3.41 | 1.89 |
| 346 | 2810 | SFN | 3.36 | 1.53 |
| 195 | 9826 | ARHGEF11 | 3.29 | 1.54 |
| 350 | 6382 | SDC1 | 3.28 | 1.31 |
| 5 | 1655 | DDX5 | 3.17 | 1.52 |
| 332 | 81 | ACTN4 | 3.11 | 1.68 |
| 45 | 6195 | RPS6KA1 | 3.05 | 1.55 |
| 76 | 130617 | ZFAND2B | 3.01 | 1.41 |
| 351 | 26525 | IL36RN | 2.94 | 1.75 |
| 296 | 2185 | PTK2B | 2.91 | 1.59 |
| 35 | 1857 | DVL3 | 2.88 | 1.52 |
| 60 | 3312 | HSPA8 | 2.85 | 1.58 |
| 247 | 23400 | ATP13A2 | 2.85 | 1.48 |
| 99 | 4796 | TONSL | 2.81 | 1.66 |
| 78 | 841 | CASP8 | 2.80 | 1.49 |
| 70 | 10411 | RAPGEF3 | 2.80 | 1.76 |
| 212 | 5777 | PTPN6 | 2.78 | 1.39 |
| 152 | 10454 | TAB1 | 2.76 | 1.41 |
| 12 | 1027 | CDKN1B | 2.76 | 1.36 |
| 51 | 8320 | EOMES | 2.75 | 2.09 |
| 225 | 994 | CDC25B | 2.74 | 1.61 |
| 90 | 2316 | FLNA | 2.72 | 1.38 |
| 292 | 29108 | PYCARD | 2.69 | 1.43 |
| 87 | 27179 | IL36A | 2.66 | 1.49 |
| 210 | 4282 | MIF | 2.64 | 1.48 |
| 224 | 10643 | IGF2BP3 | 2.61 | 1.43 |
| 357 | 6175 | RPLP0 | 2.61 | 1.29 |
| 86 | 9275 | BCL7B | 2.59 | 1.71 |
| 11 | 2931 | GSK3A | 2.58 | 1.48 |
| 10 | 3304 | HSPA1B | 2.56 | 1.52 |
| 242 | 652 | BMP4 | 2.56 | 1.39 |
| 62 | 891 | CCNB1 | 2.56 | 1.52 |
| 172 | 6434 | TRA2B | 2.54 | 1.17 |
| 58 | 4436 | MSH2 | 2.54 | 1.45 |
| 245 | 1398 | CRK | 2.53 | 1.57 |
| 313 | 4869 | NPM1 | 2.51 | 1.22 |

[0096] The GeneID is found on NCBI website available at www.ncbi.nlm.nih.gov. More information about the gene can be found by accessing the NCBI website and entering the GeneID or Gene Symbol, for instance.

### EXAMPLE 8

### Measurement of Autoantibodies Induced in Prostate Cancer Patients Following PROSTVAC

[0097] Long-term positive effects on the overall survival of prostate cancer patients treated with the PROSTVAC vaccine may involve the stimulation of the humoral immune response in cancer patients. This may involve the induction of B cells and antibodies, which target additional antigens that are not directly included in the vaccine. This generation of a broader immune response is called antigen-spreading and could be important to achieve a sustainable anti-tumor response in patients.

[0098] Thus any new antibody and antigen, which is not part of the PROSTVAC vaccine, is a potential biomarker to measure the vaccination response in prostate cancer patients. In order to investigate if the vaccination with PROSTVAC can induce a post-treatment antibody response, the change in antibody levels between T0 (pre-treatment samples), T1 (3 month) and T2 (6 month) samples was analyzed. In total, antibody responses towards 842 antigens were analyzed. The post-treatment increase in the antibody levels from baseline was analyzed by correlation analysis using Pearson's correlaton (Study Day 0,1,2).

[0099] Table 3 includes the Pearson's r-value of 39 antigens, which induce a post-treatment antibody response in prostate cancer patients treated with PROSTVAC.

TABLE 3
Pearson's correlation of antigens and autoantibodies
with higher intensity levels following PROSTVAV treatment

| | | | r_in_PROSTVAC |
|---|---|---|---|
| ID | GeneID | Gene.Symbol | Study.Day |
| 270 | 11214 | AKAP13 | 0.51 |
| 3 | 7408 | VASP | 0.37 |
| 55 | 491 | ATP2B2 | 0.35 |
| 277 | 84957 | RELT | 0.34 |
| 347 | 79650 | USB1 | 0.34 |
| 343 | 6280 | S100A9 | 0.33 |
| 298 | 9447 | AIM2 | 0.31 |
| 339 | 56300 | IL36G | 0.29 |
| 30 | 163 | AP2B1 | 0.29 |
| 45 | 6195 | RPS6KA1 | 0.28 |
| 26 | 23151 | GRAMD4 | 0.27 |
| 211 | 1297 | COL9A1 | 0.27 |
| 29 | 6758 | SSX5 | 0.26 |
| 34 | 1743 | DLST | 0.26 |
| 165 | 483 | ATP1B3 | 0.26 |
| 236 | 2670 | GFAP | 0.26 |
| 158 | 307 | ANXA4 | 0.24 |
| 268 | 1107 | CHD3 | 0.24 |
| 11 | 2931 | GSK3A | 0.23 |
| 127 | 27332 | ZNF638 | 0.23 |
| 133 | 5493 | PPL | 0.23 |
| 241 | 7134 | TNNC1 | 0.23 |
| 48 | 3956 | LGALS1 | 0.23 |
| 40 | 208 | AKT2 | 0.23 |
| 272 | 1993 | ELAVL2 | 0.23 |
| 273 | 1995 | ELAVL3 | 0.23 |
| 336 | 10573 | MRPL28 | 0.22 |
| 50 | 3305 | HSPA1L | 0.22 |
| 81 | 310 | ANXA7 | 0.21 |
| 258 | 2572 | GAD2 | 0.21 |
| 192 | 54472 | TOLLIP | 0.21 |
| 207 | 3125 | HLA-DRB3 | 0.21 |
| 146 | 6374 | CXCL5 | 0.20 |
| 240 | 7204 | TRIO | 0.20 |
| 221 | 10563 | CXCL13 | 0.20 |
| 299 | 165 | AEBP1 | 0.20 |
| 27 | 3123 | HLA-DRB1 | 0.20 |
| 4 | 1026 | CDKN1A | 0.19 |
| 260 | 9807 | IP6K1 | 0.18 |

[0100] The GeneID is found on NCBI website available at www.ncbi.nlm.nih.gov. More information about the gene can be found by accessing the NCBI website and entering the GeneID or Gene Symbol, for instance.

### EXAMPLE 9

### Measurement of Autoantibodies Correlating with Time-to-Progression in Prostate Cancer Patients Treated with PROSTVAC

[0101] One of the reasons to terminate a patient's cancer therapy or to change the therapy is disease progression. The time from the beginning of the intervention until a patient shows signs of disease progression is called Progression-free survival (PFS). In PROSTVAC clinical studies a patient's PSA levels were determined pre-treatment and post-treatment. A biochemical progression was defined as a decrease in PSA levels of greater than or equal to 30% from baseline (T0) (https://clinicaltrials.gov/ct2/show/NCT00060528).

[0102] Biomarkers correlating with progression-free survival were calculated using Pearson's correlation.

[0103] Table 4 shows 50 markers correlating positively or negatively with progression-free survival in PROSTVAC treated patients.

[0104] Biomarkers correlating with progression-free survival were calculated using Pearson's correlation. Biomarkers with a positive r-value show positive correlation with progression-free survival and show higher intensity values in patients with longer PFS. Markers showing a positive correlation can be used to identify patients who are more likely to respond to PROSTVAC therapy.

[0105] In contrast, biomarkers with a negative r-value show a negative correlation with PFS and higher levels were found in patients with lower PFS. Patients who have higher levels of these markers are less likely to respond to therapy.

TABLE 4
Pearson's correlation coefficient of markers correlating
with progression−free survival in PROSTVAC treated patients.

| | | | r_in_PROSTVAC |
|---|---|---|---|
| | Gene | Gene | Progression- |
| ID | ID | Symbol | free survival |
| 105 | 6672 | Sp100 | 0.63 |
| 106 | 3959 | LGALS3BP | 0.63 |
| 107 | 1845 | DUSP3 | 0.58 |
| 26 | 23151 | GRAMD4 | 0.56 |
| 109 | 29115 | SAP30BP | 0.53 |
| 100 | 6757 | SSX2 | 0.52 |
| 2 | 1437 | CSF2 | 0.52 |
| 101 | 2920 | CXCL2 | 0.52 |
| 112 | 2335 | FN1 | 0.51 |
| 113 | 3002 | GZMB | 0.48 |
| 102 | 23367 | LARP1 | 0.47 |
| 114 | 140462 | ASB9 | 0.46 |
| 27 | 3123 | HLA-DRB1 | 0.46 |
| 115 | 7157 | TP53 | 0.45 |
| 116 | 4001 | LMNB1 | 0.45 |
| 103 | 2921 | CXCL3 | 0.45 |
| 28 | 5552 | SRGN | 0.44 |
| 118 | 2288 | FKBP4 | 0.43 |
| 104 | 4110 | MAGEA11 | 0.41 |
| 119 | 5533 | PPP3CC | 0.41 |
| 120 | 2157 | F8 | 0.41 |
| 6 | 6638 | SNRPN | 0.40 |
| 7 | 11315 | PARK7 | 0.40 |
| 108 | 1048 | CEACAM5 | 0.40 |
| 121 | 57568 | SIPA1L2 | 0.40 |
| 110 | 2633 | GBP1 | 0.40 |
| 111 | 593 | BCKDHA | 0.39 |
| 38 | 311 | ANXA11 | 0.39 |
| 122 | 23256 | SCFD1 | 0.38 |
| 123 | 55827 | DCAF6 | 0.38 |
| 29 | 6758 | SSX5 | 0.38 |
| 39 | 3624 | INHBA | 0.38 |
| 30 | 163 | AP2B1 | 0.38 |
| 40 | 208 | AKT2 | 0.38 |
| 31 | 7520 | XRCC5 | 0.36 |
| 41 | 1785 | DNM2 | 0.35 |
| 117 | 468 | ATF4 | 0.35 |
| 32 | 3554 | IL1R1 | 0.35 |
| 130 | 7157 | TP53 | 0.34 |
| 138 | 83593 | RASSF5 | 0.35 |
| 364 | 8566 | PDXK | −0.36 |
| 365 | 2260 | FGFR1 | −0.36 |
| 366 | 5834 | PYGB | −0.37 |
| 367 | 7186 | TRAF2 | −0.37 |
| 25 | 4107 | MAGEA8 | −0.38 |
| 368 | 84444 | DOT1L | −0.40 |
| 139 | 9909 | DENND4B | −0.42 |
| 36 | 3280 | HES1 | −0.44 |
| 140 | 1390 | CREM | −0.51 |
| 37 | 5585 | PKN1 | −0.53 |

[0106] The GeneID is found on NCBI website available at www.ncbi.nlm.nih.gov. More information about the gene can be found by accessing the NCBI website and entering the GeneID or Gene Symbol, for instance.

### EXAMPLE 10

### Measurement of Autoantibodies Correlating with OVERALL SURVIVAL in Prostate Cancer Patients Treated with PROSTVAC

[0107] An important clinical outcome measure in clinical trials is the Overall Survival (OS). The overall survival is defined as the date of on-study to the date of death from any cause or last follow-up.

[0108] Biomarkers correlating with OS were calculated using Pearson's correlation. Biomarkers with a positive r-value show positive correlation with OS and show higher intensity values in patients with longer OS. These markers can be used to identify patients who have a better overall survival time and may be more likely to benefit from PROSTVAC therapy.

[0109] In contrast, biomarkers with a negative r-value show a negative correlation with OS and higher levels were found in patients with lower OS.

[0110] Table 5 shows 70 markers correlating positively or negatively with OS in PROSTVAC treated patients.

TABLE 5
Pearson's correlation coefficient of markers
correlating with OS in PROSTVAC treated patients.

| | Gene | Gene | r_in_Prostvac |
|---|---|---|---|
| ID | ID | Symbol | Overall Survival |
| 164 | 23032 | USP33 | 0.57 |
| 49 | 79155 | TNIP2 | 0.57 |
| 168 | 7343 | UBTF | 0.56 |
| 161 | 25865 | PRKD2 | 0.52 |
| 280 | 4582 | MUC1 | 0.52 |
| 223 | 7417 | VDAC2 | 0.46 |
| 182 | 80342 | TRAF3IP3 | 0.46 |
| 16 | 5137 | PDE1C | 0.45 |
| 177 | 23396 | PIP5K1C | 0.45 |
| 2 | 1437 | CSF2 | 0.45 |
| 229 | 3326 | HSP90AB1 | 0.45 |
| 135 | 2266 | FGG | 0.45 |
| 41 | 1785 | DNM2 | 0.44 |
| 24 | 9133 | CCNB2 | 0.42 |
| 248 | 2617 | GARS | 0.41 |
| 31 | 7520 | XRCC5 | 0.41 |
| 174 | 3146 | HMGB1 | 0.40 |
| 1 | 3620 | IDO1 | 0.40 |
| 39 | 3624 | INHBA | 0.39 |
| 85 | 8490 | RGS5 | 0.39 |
| 301 | 4846 | NOS3 | 0.39 |
| 263 | 1991 | ELANE | 0.36 |
| 154 | 8971 | H1FX | 0.35 |
| 52 | 9173 | IL1RL1 | 0.35 |
| 251 | 79714 | CCDC51 | 0.35 |
| 291 | 2064 | ERBB2 | 0.35 |
| 304 | 27101 | CACYBP | 0.35 |
| 150 | 29968 | PSAT1 | 0.22 |
| 63 | 30848 | CTAG2 | −0.20 |
| 64 | 30848 | CTAG2 | −0.20 |
| 356 | 10963 | STIP1 | −0.32 |
| 156 | 629 | CFB | −0.35 |
| 334 | 3710 | ITPR3 | −0.35 |
| 252 | 5535 | PPP3R2 | −0.35 |
| 276 | 118430 | MUCL1 | −0.35 |
| 5 | 1655 | DDX5 | −0.35 |
| 244 | 5529 | PPP2R5E | −0.35 |
| 70 | 10411 | RAPGEF3 | −0.36 |
| 78 | 841 | CASP8 | −0.36 |
| 294 | 2243 | FGA | −0.36 |
| 321 | 9506 | PAGE4 | −0.36 |
| 239 | 128866 | CHMP4B | −0.37 |
| 222 | 6351 | CCL4 | −0.37 |
| 145 | 3566 | IL4R | −0.37 |
| 37 | 5585 | PKN1 | −0.38 |
| 71 | 8517 | IKBKG | −0.38 |
| 28 | 5552 | SRGN | −0.38 |
| 21 | 154 | ADRB2 | −0.38 |
| 246 | 332 | BIRC5 | −0.39 |
| 312 | 3181 | HNRNPA2B1 | −0.39 |
| 86 | 9275 | BCL7B | −0.39 |
| 271 | 6626 | SNRPA | −0.40 |
| 227 | 156 | GRK2 | −0.40 |
| 259 | 80705 | TSGA10 | −0.40 |
| 318 | 708 | C1QBP | −0.40 |
| 326 | 10940 | POP1 | −0.41 |
| 331 | 6786 | STIM1 | −0.41 |
| 129 | 8648 | NCOA1 | −0.42 |
| 228 | 10071 | MUC12 | −0.43 |
| 269 | 25824 | PRDX5 | −0.43 |
| 295 | 257106 | ARHGAP30 | −0.44 |
| 79 | 843 | CASP10 | −0.44 |
| 320 | 3178 | HNRNPA1 | −0.45 |
| 87 | 27179 | IL36A | −0.46 |
| 319 | 672 | BRCA1 | −0.47 |
| 328 | 3856 | KRT8 | −0.47 |
| 308 | 312 | ANXA13 | −0.48 |
| 285 | 3662 | IRF4 | −0.51 |
| 200 | 4858 | NOVA2 | −0.52 |
| 232 | 4150 | MAZ | −0.55 |

[0111] The GeneID is found on NCBI website available at www.ncbi.nlm.nih.gov. More information about the gene can be found by accessing the NCBI website and entering the GeneID or Gene Symbol, for instance.

### EXAMPLE 11

### Identification and Measurement of Antibodies Targeting Tumor-Associated Antigens and Self-Antigens in Prostate Cancer Patients Treated with PROSTVAC Plus Ipilimumab

[0112] Although PROSTVAC vaccination has been shown to improve the overall survival of prostate cancer patients, some patients experienced progression or relapse of the disease. There is evidence that cytotoxic T cells upregulate the T-lymphocyte-associated protein 4 (CTLA4), a negative regulatory molecule. Ipilimumab (Bristol-Myers Squibb, New York, N.Y., USA) is an antagonistic anti-CTLA4 monoclonal antibody that blocks the activity of CTLA4. Ipilimumab has been assessed in the treatment of prostate cancer, in which a minority (about 20%) of patients had significant PSA declines. Clinical data suggest, that combining immune checkpoint inhibition with therapeutic cancer vaccines, has the potential to improve the proportion of patients seeing long-term durable responses with these therapies.

[0113] In a phase I clinical trial 30 study participants with metastatic castration-resistant prostate cancer (mCRPC) were treated with PROSTVAC and escalating doses of ipilimumab (Madan et al., 2012). Serum samples from 24 patients treated with PROSTVAC plus ipilimumab were tested for the presence of autoantibodies against 842 preselected antigens Samples were collected prior to treatment (T0 samples) and two timepoints during treatment. The T1 corresponds to 90 days (3 month) and the T2 samples corresponds to 180 days (6 month).

### EXAMPLE 12

### Measurement of Autoantibodies Induced in Prostate Cancer Patients Following PROSTVAC Plus Ipilimumab

[0114] Long-term positive effects on the overall survival of prostate cancer patients treated with the PROSTVAC plus Ipilimumab may involve the stimulation of the humoral immune response in cancer patients. This may involve the induction of B cells and antibodies, which target additional antigens that are not directly included in the vaccine. This generation of a broader immune response is called antigen-spreading and could be important to achieve a sustainable anti-tumor response in patients.

[0115] Thus, any new antibody and antigen, which is not part of the PROSTVAC plus Ipilimumab treatment regime, is a potential biomarker to measure the vaccination response in prostate cancer patients. In order to investigate if PROSTVAC plus Ipilimumab can induce a post-treatment antibody response, the change in antibody levels between T0 (pre-treatment samples) and T1 (3 month) and T2 (6 month) samples was analyzed. In total, antibody responses towards 842 antigens were analyzed. The post-treatment increase in the antibody levels from baseline was analyzed by correlation analysis using Pearson's correlaton (Study Day 0,1,2).

[0116] Furthermore, the post-treatment samples T1 and T2 were compared to T0 samples using SAMR.

[0117] Table 6 includes the Pearson's r-value of 25 antigens, which induce a post-treatment antibody response in prostate cancer patients treated with PROSTVAC plus Ipilimumab.

TABLE 6
Markers induced by PROSTVAC plus Ipilimumab treatment

| | Gene | Gene | r-value | SAMR_pre- | SAMR_pre- |
|---|---|---|---|---|---|
| ID | ID | Symbol | Study.Day | post_treatment_Score.d. | post_treatment_Fold.Change |
| 4 | 1026 | CDKN1A | 0.10 | 4.19 | 3.80 |
| 2 | 1437 | CSF2 | 0.54 | 2.82 | 2.30 |
| 3 | 7408 | VASP | 0.63 | 3.51 | 2.26 |
| 191 | 4102 | MAGEA3 | 0.18 | 1.68 | 1.58 |
| 48 | 3956 | LGALS1 | 0.25 | 2.14 | 1.52 |
| 62 | 891 | CCNB1 | 0.28 | 1.75 | 1.51 |
| 205 | 3586 | IL10 | 0.17 | 1.54 | 1.44 |
| 137 | 3306 | HSPA2 | 0.39 | 1.73 | 1.42 |
| 155 | 7494 | XBP1 | 0.43 | 1.41 | 1.40 |
| 175 | 7167 | TPI1 | 0.14 | 1.53 | 1.34 |
| 50 | 3305 | HSPA1L | 0.36 | 1.59 | 1.31 |
| 60 | 3312 | HSPA8 | 0.37 | 1.26 | 1.31 |
| 42 | 729447 | GAGE2A | 0.22 | 0.92 | 1.26 |
| 43 | 729408 | GAGE2D | 0.22 | 0.92 | 1.26 |
| 44 | 26749 | GAGE2E | 0.22 | 0.92 | 1.26 |
| 134 | 5957 | RCVRN | 0.28 | 1.11 | 1.23 |
| 23 | 1493 | CTLA4 | 0.33 | 1.31 | 1.20 |
| 95 | 10285 | SMNDC1 | 0.24 | 0.55 | 1.16 |
| 261 | 1981 | EIF4G1 | 0.31 | 1.05 | 1.15 |
| 173 | 30827 | CXXC1 | 0.28 | 0.73 | 1.14 |
| 132 | 1639 | DCTN1 | 0.25 | 0.37 | 1.08 |
| 9 | 10015 | PDCD6IP | 0.27 | 0.24 | 1.05 |
| 187 | 7481 | WNT11 | 0.32 | 0.19 | 1.04 |
| 71 | 8517 | IKBKG | 0.24 | 0.17 | 1.03 |
| 36 | 3280 | HES1 | 0.25 | −0.42 | 0.90 |

[0118] The GeneID is found on NCBI website available at www.ncbi.nlm.nih.gov. More information about the gene can be found by accessing the NCBI website and entering the GeneID or Gene Symbol, for instance.

### EXAMPLE 13

### Measurement of Autoantibodies Correlating with the Predicted Median OS-Halabi in Prostate Cancer Patients Treated with PROSTVAC Plus Ipilimumab

[0119] One of the reasons to terminate a patient's cancer therapy or to change the therapy is disease progression. The predicted median overall survival (OS) by the Halabi nomogram is prognostic model for patients with metastatic castration-resistant prostate cancer (mCRPC) that can be used to compute individual predicted survival probability at different time points (Halabi et al., 2014).

[0120] Biomarkers correlating with OS-Halabi were calculated using Pearson's correlation.

[0121] Table 7 shows 64 markers correlating positively or negatively with OS-Halabi in PROSTVAC plus Ipilimumab treated patients.

TABLE 7
Pearson's correlation coefficient of markers correlating
with OS-Halabi in PROSTVAC plus Ipilimumab treated patients.

| | Gene | Gene | |
|---|---|---|---|
| ID | ID | Symbol | r_in_prostvac_ipi_Best.Response |
| 89 | 1 | A1BG | 0.49 |
| 66 | 64763 | ZNF574 | 0.48 |
| 85 | 8490 | RGS5 | 0.47 |
| 73 | 283431 | GAS2L3 | 0.46 |
| 58 | 4436 | MSH2 | 0.46 |
| 215 | 1509 | CTSD | 0.45 |
| 54 | 23646 | PLD3 | 0.44 |
| 47 | 3397 | ID1 | 0.43 |
| 157 | 1287 | COL4A5 | 0.42 |
| 282 | 3004 | GZMM | 0.42 |
| 183 | 3728 | JUP | 0.40 |
| 184 | 6242 | RTKN | 0.40 |
| 142 | 5934 | RBL2 | 0.40 |
| 69 | 2045 | EPHA7 | 0.39 |
| 82 | 1060 | CENPC | 0.39 |
| 143 | 3611 | ILK | 0.38 |
| 72 | 5223 | PGAM1 | 0.38 |
| 293 | 4241 | MELTF | 0.38 |
| | | (formerly: | |
| | | MFI2) | |
| 19 | 9240 | PNMA1 | 0.37 |
| 33 | 6625 | SNRNP70 | 0.37 |
| 153 | 65264 | UBE2Z | 0.37 |
| 264 | 5055 | SERPINB2 | 0.36 |
| 1 | 3620 | IDO1 | 0.36 |
| 96 | 10000 | AKT3 | 0.36 |
| 22 | 5971 | RELB | 0.36 |
| 235 | 80310 | PDGFD | 0.35 |
| 354 | 23061 | TBC1D9B | 0.35 |
| 20 | 64326 | RFWD2 | 0.35 |
| 17 | 4843 | NOS2 | 0.35 |
| 253 | 5155 | PDGFB | 0.35 |
| 97 | 5801 | PTPRR | 0.35 |
| 337 | 10013 | HDAC6 | 0.35 |
| 63 | 30848 | CTAG2 | −0.23 |
| 64 | 30848 | CTAG2 | −0.23 |
| 179 | 1938 | EEF2 | −0.35 |
| 180 | 1938 | EEF2 | −0.35 |
| 65 | 1387 | CREBBP | −0.36 |
| 243 | 203286 | ANKS6 | −0.36 |
| 46 | 273 | AMPH | −0.36 |
| 49 | 79155 | TNIP2 | −0.36 |
| 317 | 6629 | SNRPB2 | −0.36 |
| 218 | 201161 | CENPV | −0.36 |
| 311 | 23135 | KDM6B | −0.37 |
| 349 | 84968 | PNMA6A | −0.37 |
| 214 | 4137 | MAPT | −0.37 |
| 88 | 5906 | RAP1A | −0.38 |
| 68 | 59067 | IL21 | −0.38 |
| 181 | 22994 | CEP131 | −0.38 |
| 51 | 8320 | EOMES | −0.39 |
| 363 | 10492 | SYNCRIP | −0.40 |
| 16 | 5137 | PDE1C | −0.40 |
| 18 | 7299 | TYR | −0.42 |
| 340 | 598 | BCL2L1 | −0.42 |
| 11 | 2931 | GSK3A | −0.43 |
| 57 | 30850 | CDR2L | −0.43 |
| 84 | 283748 | PLA2G4D | −0.45 |
| 186 | 5657 | PRTN3 | −0.46 |
| 98 | 2099 | ESR1 | −0.46 |
| 8 | 8503 | PIK3R3 | −0.48 |
| 83 | 3161 | HMMR | −0.49 |
| 91 | 6464 | SHC1 | −0.49 |
| 25 | 4107 | MAGEA8 | −0.50 |

[0122] The GeneID is found on NCBI website available a www.ncbi.nlm.nih.gov. More information about the gene can be found by accessing the NCBI website and entering the GeneID or Gene Symbol, for instance.

### EXAMPLE 14

### Measurement of Autoantibodies Correlating with OVERALL SURVIVAL in Prostate Cancer Patients Treated with PROSTVAC

[0123] Biomarkers correlating with OS were calculated using Pearson's correlation. Biomarkers with a positive r-value show positive correlation with OS and show higher intensity values in patients with longer OS. These markers can be used to identify patients who have a better overall survival time and may be more likely to benefit from PROSTVAC plus Ipilimumab therapy.

[0124] In contrast, biomarkers with a negative r-value show a negative correlation with OS and higher levels were found in patients with lower OS.

[0125] Table 8 shows 70 markers correlating positively or negatively with OS in PROSTVAC treated patients.

TABLE 8
Markers correlating with OS in PROSTVAC
plus Ipilimumab treated patients.

| | Gene | Gene | |
|---|---|---|---|
| ID | ID | Symbol | r_in_prostvac_ipi_Overall.Survival |
| 33 | 6625 | SNRNP70 | 0.68 |
| 22 | 5971 | RELB | 0.59 |
| 47 | 3397 | ID1 | 0.55 |
| 96 | 10000 | AKT3 | 0.55 |
| 66 | 64763 | ZNF574 | 0.52 |
| 163 | 1174 | AP1S1 | 0.52 |
| 73 | 283431 | GAS2L3 | 0.52 |
| 333 | 6634 | SmD3 | 0.51 |
| 97 | 5801 | PTPRR | 0.50 |
| 238 | 7001 | PRDX2 | 0.49 |
| 13 | 26022 | TMEM98 | 0.47 |
| 82 | 1060 | CENPC | 0.45 |
| 17 | 4843 | NOS2 | 0.45 |
| 176 | 80184 | CEP290 | 0.45 |
| 69 | 2045 | EPHA7 | 0.44 |
| 74 | 5937 | RBMS1 | 0.42 |
| 14 | 4171 | MCM2 | 0.42 |
| 15 | 6494 | SIPA1 | 0.42 |
| 67 | 408 | ARRB1 | 0.41 |
| 9 | 10015 | PDCD6IP | 0.41 |
| 169 | 4000 | LMNA | 0.41 |
| 54 | 23646 | PLD3 | 0.41 |
| 267 | 80152 | CENPT | 0.40 |
| 206 | 84419 | C15orf48 | 0.40 |
| 89 | 1 | A1BG | 0.40 |
| 281 | 84365 | NIFK | 0.40 |
| 72 | 5223 | PGAM1 | 0.40 |
| 5 | 1655 | DDX5 | 0.39 |
| 80 | 3908 | LAMA2 | 0.39 |
| 329 | 801 | CALM1 | 0.38 |
| 330 | 805 | CALM2 | 0.38 |
| 196 | 5455 | POU3F3 | 0.38 |
| 305 | 58498 | MYL7 | 0.38 |
| 279 | 3646 | EIF3E | 0.38 |
| 171 | 2870 | GRK6 | 0.37 |
| 352 | 6631 | SNRPC | 0.37 |
| 1 | 3620 | IDO1 | 0.37 |
| 55 | 491 | ATP2B2 | 0.36 |
| 316 | 1977 | EIF4E | 0.36 |
| 201 | 5868 | RAB5A | 0.35 |
| 208 | 1485 | CTAG1B | 0.24 |
| 209 | 1485 | CTAG1B | 0.24 |
| 324 | 3437 | IFIT3 | 0.24 |
| 126 | 2919 | CXCL1 | 0.24 |
| 151 | 4088 | SMAD3 | 0.20 |
| 234 | 7918 | GPANK1 | −0.35 |
| 25 | 4107 | MAGEA8 | −0.35 |
| 16 | 5137 | PDE1C | −0.35 |
| 24 | 9133 | CCNB2 | −0.35 |
| 8 | 8503 | PIK3R3 | −0.35 |
| 18 | 7299 | TYR | −0.36 |
| 204 | 11140 | CDC37 | −0.37 |
| 202 | 1511 | CTSG | −0.37 |
| 203 | 6634 | SNRPD3 | −0.37 |
| 302 | 655 | BMP7 | −0.37 |
| 303 | 8646 | CHRD | −0.37 |
| 98 | 2099 | ESR1 | −0.37 |
| 297 | 4599 | Mχ1 | −0.38 |
| 6 | 6638 | SNRPN | −0.38 |
| 287 | 25930 | PTPN23 | −0.38 |
| | | (formerly: | |
| | | SRPR) | |
| 310 | 3960 | LGALS4 | −0.38 |
| 75 | 6181 | RPLP2 | −0.38 |
| 57 | 30850 | CDR2L | −0.38 |
| 167 | 4069 | LYZ | −0.39 |
| 53 | 6624 | FSCN1 | −0.41 |
| 91 | 6464 | SHC1 | −0.42 |
| 84 | 283748 | PLA2G4D | −0.43 |
| 162 | 10938 | EHD1 | −0.44 |
| 65 | 1387 | CREBBP | −0.49 |
| 83 | 3161 | HMMR | −0.55 |

[0126] The GeneID is found on NCBI website available at www.ncbi.nlm.nih.gov. More information about the gene can be found by accessing the NCBI website and entering the GeneID or Gene Symbol, for instance.

### EXAMPLE 15

### Identification of Biomarkers Associated with Immune-Related Adverse Effects (irAE) in PROSTVAC Plus Ipilimumab Treated Prostate Cancer Patients

[0127] Despite important clinical benefits, checkpoint inhibitors area associated with immune-related adverse events (irAEs) The mechanisms by which checkpoint inhibitors induce irAEs are not completely understood. It is believed that by blocking negative checkpoints a general immunologic enhancement occurs. It is also possible that by unleashing the immune-checkpoints that control tolerance, autoreactive lymphocytes are activated, which could be either T cells or B cells. It is well known that in autoimmune diseases autoreactive B cells produce autoantibodies that can induce tissue damage via ADCC. Thus, epitope spreading towards self-antigens may be an indicator for irAEs.

[0128] Autoantibodies correlating with irAEs were identified by Pearson's correlation analysis and SAMR.

[0129] Table 9 includes 87 biomarkers that are associated with irAE in PROSTVAC plus ipilimumab treated prostate cancer patients.

[0130] These biomarkers may be used to predict irAE in baseline samples of patients and prior to therapy or are induced following treatment.

TABLE 9
Biomarkers of irAE in patients treated
with PROSTVAC plus ipilimumab.

| | Gene | Gene | Pear- | SAMR | |
|---|---|---|---|---|---|
| ID | ID | Symbol | son'r | score.d. | SAMR_Fold.Change |
| 314 | 51135 | IRAK4 | 0.56 | 4.67 | 3.35 |
| 185 | 90993 | CREB3L1 | 0.53 | 3.91 | 1.95 |
| 249 | 60 | ACTB | 0.47 | 3.85 | 3.15 |
| 250 | 4302 | MLLT6 | 0.47 | 3.85 | 3.15 |
| 341 | 3854 | KRT6B | 0.46 | 3.32 | 1.87 |
| 52 | 9173 | IL1RL1 | 0.46 | 3.27 | 1.80 |
| 76 | 130617 | ZFAND2B | 0.46 | 3.15 | 1.66 |
| 14 | 4171 | MCM2 | 0.45 | 3.83 | 6.11 |
| 15 | 6494 | SIPA1 | 0.45 | 3.83 | 6.11 |
| 128 | 5034 | P4HB | 0.43 | 3.45 | 3.02 |
| 213 | 4793 | NFKBIB | 0.43 | 3.38 | 2.64 |
| 74 | 5937 | RBMS1 | 0.43 | 3.45 | 3.16 |
| 13 | 26022 | TMEM98 | 0.43 | 3.32 | 2.43 |
| 17 | 4843 | NOS2 | 0.42 | 3.21 | 2.22 |
| 226 | 9240 | PNMA1 | 0.42 | 3.11 | 2.03 |
| 178 | 3875 | KRT18 | 0.42 | 3.24 | 2.46 |
| 61 | 9094 | UNC119 | 0.41 | 3.28 | 2.98 |
| 1 | 3620 | IDO1 | 0.40 | 3.03 | 2.20 |
| 362 | 79441 | HAUS3 | 0.39 | 3.12 | 3.10 |
| 20 | 64326 | RFWD2 | 0.39 | 2.89 | 2.04 |
| 325 | 29082 | CHMP4A | 0.37 | 2.84 | 2.15 |
| 290 | 8027 | STAM | 0.37 | 2.68 | 1.75 |
| 148 | 26037 | SIPA1L1 | 0.37 | 2.83 | 2.28 |
| 12 | 1027 | CDKN1B | 0.37 | 2.67 | 1.82 |
| 257 | 1284 | COL4A2 | 0.37 | 2.33 | 1.40 |
| 32 | 3554 | IL1R1 | 0.37 | 2.66 | 1.79 |
| 255 | 3853 | KRT6A | 0.37 | 2.61 | 1.71 |
| 289 | 5921 | RASA1 | 0.37 | 2.88 | 2.71 |
| 81 | 310 | ANXA7 | 0.36 | 2.37 | 1.45 |
| 124 | 60560 | NAA35 | 0.36 | 2.75 | 2.11 |
| 9 | 10015 | PDCD6IP | 0.36 | 2.69 | 2.11 |
| 194 | 57402 | S100A14 | 0.35 | 2.56 | 1.78 |
| 95 | 10285 | SMNDC1 | 0.35 | 2.83 | 3.25 |
| 80 | 3908 | LAMA2 | 0.35 | 2.44 | 1.61 |
| 170 | 80184 | CEP290 | 0.35 | 2.69 | 2.35 |
| 93 | 4802 | NFYC | 0.35 | 2.64 | 2.16 |
| 254 | 55703 | POLR3B | 0.34 | 2.59 | 2.13 |
| 144 | 672 | BRCA1 | 0.34 | 2.60 | 2.20 |
| 131 | 1487 | CTBP1 | 0.34 | 2.60 | 2.20 |
| 92 | 5705 | PSMC5 | 0.34 | 2.67 | 2.81 |
| 10 | 3304 | HSPA1B | 0.33 | 2.54 | 2.12 |
| 160 | 10718 | NRG3 | 0.33 | 2.61 | 2.58 |
| 46 | 273 | AMPH | 0.33 | 2.55 | 2.22 |
| 355 | 6923 | ELOB | 0.33 | 2.52 | 2.20 |
| | | (formerly: | | | |
| | | TCEB2) | | | |
| 306 | 4286 | MITF | 0.33 | 2.52 | 2.20 |
| 141 | 2934 | GSN | 0.33 | 2.50 | 2.29 |
| 231 | 286514 | MAGEB18 | 0.32 | 2.43 | 2.10 |
| 315 | 567 | B2M | −0.35 | −2.24 | 0.70 |
| 344 | 3075 | CFH | −0.35 | −2.31 | 0.68 |
| 188 | 922 | CD5L | −0.35 | −1.70 | 0.85 |
| 283 | 2160 | F11 | −0.35 | −1.93 | 0.81 |
| 237 | 55801 | IL26 | −0.36 | −1.90 | 0.82 |
| 275 | 56475 | RPRM | −0.36 | −2.44 | 0.65 |
| 256 | 2885 | GRB2 | −0.37 | −2.50 | 0.64 |
| 75 | 6181 | RPLP2 | −0.37 | −2.52 | 0.64 |
| 361 | 5154 | PDGFA | −0.37 | −2.62 | 0.59 |
| 159 | 23299 | BICD2 | −0.37 | −2.71 | 0.55 |
| 286 | 5337 | PLD1 | −0.38 | −2.69 | 0.60 |
| 197 | 112950 | MED8 | −0.39 | −3.06 | 0.37 |
| 53 | 6624 | FSCN1 | −0.39 | −2.30 | 0.75 |
| 190 | 8190 | MIA | −0.39 | −2.75 | 0.59 |
| 6 | 6638 | SNRPN | −0.40 | −2.06 | 0.81 |
| 278 | 5025 | P2RX4 | −0.40 | −1.81 | 0.86 |
| 307 | 10537 | UBD | −0.40 | −2.88 | 0.54 |
| 59 | 1211 | CLTA | −0.41 | −3.26 | 0.33 |
| 199 | 7276 | TTR | −0.41 | −3.11 | 0.46 |
| 8 | 8503 | PIK3R3 | −0.41 | −2.92 | 0.58 |
| 198 | 1191 | CLU | −0.42 | −2.36 | 0.77 |
| 360 | 7405 | UVRAG | −0.43 | −3.07 | 0.55 |
| 335 | 115362 | GBP5 | −0.45 | −3.12 | 0.59 |
| 309 | 3320 | HSP90AA1 | −0.47 | −3.87 | 0.27 |
| 348 | 9500 | MAGED1 | −0.47 | −2.75 | 0.73 |
| 288 | 7419 | VDAC3 | −0.48 | −3.41 | 0.55 |
| 147 | 30011 | SH3KBP1 | −0.48 | −3.50 | 0.52 |
| 38 | 311 | ANXA11 | −0.49 | −3.31 | 0.61 |
| 358 | 3606 | IL18 | −0.50 | −3.29 | 0.64 |
| 327 | 6636 | SNRPF | −0.51 | −3.34 | 0.65 |
| 18 | 7299 | TYR | −0.52 | −2.99 | 0.73 |
| 353 | 3902 | LAG3 | −0.53 | −3.65 | 0.59 |
| 274 | 720 | C4A | −0.53 | −3.55 | 0.62 |
| 24 | 9133 | CCNB2 | −0.54 | −3.45 | 0.66 |
| 265 | 3446 | IFNA10 | −0.55 | −3.73 | 0.60 |
| 21 | 154 | ADRB2 | −0.56 | −4.77 | 0.24 |
| 68 | 59067 | IL21 | −0.58 | −4.29 | 0.51 |
| 266 | 3441 | IFNA4 | −0.58 | −3.18 | 0.74 |
| 284 | 174 | AFP | −0.60 | −3.61 | 0.69 |
| 230 | 64806 | IL25 | −0.64 | −3.74 | 0.70 |

[0131] The GeneID is found on NCBI website available at www.ncbi.nlm.nih.gov. More information about the gene can be found by accessing the NCBI website and entering the GeneID or Gene Symbol, for instance.

### REFERENCES

[0132] Bei, R., Masuelli, L., Palumbo, C., Modesti, M., and Modesti, A. (2009). A common repertoire of autoantibodies is shared by cancer and autoimmune disease patients: Inflammation in their induction and impact on tumor growth. Cancer Lett. 281, 8-23.

[0133] Brahmer, J. R., Tykodi, S. S., Chow, L. Q. M., Hwu, W.-J., Topalian, S. L., Hwu, P., Drake, C. G., Camacho, L. H., Kauh, J., Odunsi, K., et al. (2012). Safety and Activity of Anti-PD-L1 Antibody in Patients with Advanced Cancer. N. Engl. J. Med. 366, 2455-2465.

[0134] Buchbinder, E. I., and Desai, A. (2016). CTLA-4 and PD-1 Pathways: Similarities, Differences, and Implications of Their Inhibition. Am. J. Clin. Oncol. 39, 98-106.

[0135] Budde, P., Zucht, H.-D., Vordenba umen, S., Goehler, H., Fischer-Betz, R., Gamer, M., Marquart, K., Rengers, P., Richter, J., Lueking, A., et al. (2016). Multiparametric detection of autoantibodies in systemic lupus erythematosus. Lupus 25, 812-822.

[0136] Chiaruttini, G., Mele, S., Opzoomer, J., Crescioli, S., Ilieva, K. M., Lacy, K. E., and Karagiannis, S. N. (2017). B cells and the humoral response in melanoma: The overlooked players of the tumor microenvironment. Oncolmmunology 6, e1294296.

[0137] Ferlay, J., Soerjomataram, I., Dikshit, R., Eser, S., Mathers, C., Rebelo, M., Parkin, D. M., Forman, D., and Bray, F. (2015). Cancer incidence and mortality worldwide: sources, methods and major patterns in GLOBOCAN 2012. Int. J. Cancer 136, E359-386.

[0138] Gulley, J. L., Madan, R. A., Tsang, K. Y., Jochems, C., Marté, J. L., Farsaci, B., Tucker, J. A., Hodge, J. W., Liewehr, D. J., Steinberg, S. M., et al. (2014). Immune Impact Induced by PROSTVAC (PSA-TRICOM), a Therapeutic Vaccine for Prostate Cancer. Cancer Immunol. Res. 2, 133-141.

[0139] Halabi, S., Lin, C.-Y., Kelly, W. K., Fizazi, K. S., Moul, J. W., Kaplan, E. B., Morris, M. J., and Small, E. J. (2014). Updated Prognostic Model for Predicting Overall Survival in First-Line Chemotherapy for Patients With Metastatic Castration-Resistant Prostate Cancer. J. Clin. Oncol. 32, 671-677.

[0140] Kantoff, P. W., Gulley, J. L., and Pico-Navarro, C. (2017). Revised Overall Survival Analysis of a Phase II, Randomized, Double-Blind, Controlled Study of PROSTVAC in Men With Metastatic Castration-Resistant Prostate Cancer. J. Clin. Oncol. 35, 124-125.

[0141] Madan, R. A., Mohebtash, M., Arlen, P. M., Vergati, M., Rauckhorst, M., Steinberg, S. M., Tsang, K. Y., Poole, D. J., Parnes, H. L., Wright, J. J., et al. (2012). Ipilimumab and a poxviral vaccine targeting prostate-specific antigen in metastatic castration-resistant prostate cancer: a phase 1 dose-escalation trial. Lancet Oncol. 13, 501-508.

[0142] Manson, G., Norwood, J., Marabelle, A., Kohrt, H., and Houot, R. (2016). Biomarkers associated with checkpoint inhibitors. Ann. Oncol. 27, 1199-1206.

[0143] Palermo, G., Piraino, P., and Zucht, H.-D. (2009). Performance of PLS regression coefficients in selecting variables for each response of a multivariate PLS for omics-type data. Adv. Appl. Bioinforma. Chem. AABC 2, 57-70.

[0144] Robin, X., Turck, N., Hainard, A., Tiberti, N., Lisacek, F., Sanchez, J.-C., and Müller, M. (2011). pROC: an open-source package for R and S+ to analyze and compare ROC curves. BMC Bioinformatics 12, 77.

[0145] Spain, L., Diem, S., and Larkin, J. (2016). Management of toxicities of immune checkpoint inhibitors. Cancer Treat. Rev. 44, 51-60.

[0146] Topalian, S. L., Taube, J. M., Anders, R. A., and Pardoll, D. M. (2016). Mechanism-driven biomarkers to guide immune checkpoint blockade in cancer therapy. Nat. Rev. Cancer 16, 275-287.

[0147] Tusher, V. G., Tibshirani, R., and Chu, G. (2001). Significance analysis of microarrays applied to the ionizing radiation response. Proc. Natl. Acad. Sci. U.S.A. 98, 5116-5121.

1. A method of identifying a tumor-associated antigen (TAA) for prostate cancer comprising:
a) selecting a group of patients with prostate cancer and a group of patients who are healthy;
b) assaying the level of an autoantibody to an antigen in a sample from a patient in the group;
c) comparing the level of the autoantibody from the patient in the group or the group of patients with prostate cancer to the level of the autoantibody in the group of healthy patients; and
d) determining that the antigen is a TAA for prostate cancer if the level of the autoantibody to the antigen is statistically different between the group of patients with prostate cancer versus the group of healthy patients.

2. The method of claim 1, wherein the antigen is an antigen encoded by a gene listed in Table 1.

3. The method of claim 1, wherein the TAA is encoded by a gene listed in Table 2.

4. The method of claim 1, wherein the assaying comprises b1) contacting a portion of serum from the patient with a sample of an antigen immobilized onto a solid support.

5. The method of claim 4, wherein the solid support is a bead.

6. The method of claim 5, wherein the bead is a microsphere.

7. A method of identifying a tumor-associated antigen (TAA) as a marker for prostate cancer vaccination response comprising:
a) selecting a group of patients with prostate cancer who have been vaccinated with a vaccine effective to induce an immune response against a prostate cancer antigen and a group of patients with prostate cancer who have not been vaccinated with the vaccine;
b) assaying the level of an autoantibody to the antigen in a sample from each of the patients with prostate cancer who have been vaccinated;
c) comparing the level of the autoantibody to the antigen in each of the patients with prostate cancer who have been vaccinated to the level of the autoantibody in each of the patients with prostate cancer who have not been vaccinated; and
d) determining that the antigen is a TAA marker for prostate cancer vaccination response if the level of the autoantibody to the antigen is statistically different between the group of patients with prostate cancer who have been vaccinated versus the group of patients with prostate cancer who have not been vaccinated.

8. The method of claim 7, wherein the antigen is encoded by a gene listed in Table 3.

9. The method of claim 7, wherein the TAA marker for prostate cancer is encoded by a gene listed in Table 3.

10. The method of claim 7, wherein the assaying comprises b1) contacting a portion of serum from the patient with a sample of an antigen immobilized onto a solid support.

11. The method of claim 10, wherein the solid support is a bead.

12. The method of claim 11, wherein the bead is a microsphere.

13. A method of identifying and treating a prostate cancer patient with PROSTVAC therapy or for vaccination with a prostate antigen comprising:
a) determining the level of one or more antigens encoded by a gene listed in Table 4 having a positive value for r_in_PROSTVAC Progression-free survival;
b) assaying the level of one or more antigens in a sample from a prostate cancer patient;
c) comparing the level of the one or more antigens with an average level of the one or more antigens for a group of patients with prostate cancer who have not undergone PROSTVAC therapy; and
d) administering the PROSTVAC therapy, Ipilimumab, and/or the vaccination with a prostate antigen if the level of the one or more antigens in the patient is greater than the average level of the one or more antigens in the group of patients with prostate cancer.

14-18. (canceled)

19. A method of identifying and treating a prostate cancer patient with PROSTVAC therapy or for vaccination with a prostate antigen comprising:
a) determining the level of one or more antigens encoded by a gene listed in Table 4 having a negative value for r_in_PROSTVAC Progression-free survival;
b) assaying the level of one or more antigens in a sample from a prostate cancer patient;
c) comparing the level of the one or more antigens with an average level of the one or more antigens for a group of patients with prostate cancer; and
d) administering the PROSTVAC therapy, Ipilimumab, and/or the vaccination with a prostate antigen if the level of the one or more antigens in the patient is less than the average level of the one or more antigens in the group of patients with prostate cancer.

20-24. (canceled)

25. A method of monitoring the effectiveness of therapy in a prostate cancer patient previously treated with PROSTVAC vaccination or prostate antigen vaccination comprising:
a) determining the level of one or more antigens encoded by a gene listed in Table 4 having a negative value for r_in_PROSTVAC Progression-free survival by assaying a sample from a prostate cancer patient;
b) comparing the level of the one or more antigens with an average level of the one or more antigens for a group of patients with prostate cancer; and
c) determining that the PROSTVAC therapy is effective if the level of the one or more antigens in the patient is less than the average level of the one or more antigens in the group of patients with prostate cancer.

26. A method of monitoring the effectiveness of therapy in a prostate cancer patient previously treated with PROSTVAC vaccination or prostate antigen vaccination comprising:
a) determining the level of one or more antigens encoded by a gene listed in Table 4 having a positive value for r_in_PROSTVAC Progression-free survival by assaying the level of one or more antigens in a sample from a prostate cancer patient;
b) comparing the level of the one or more antigens with an average level of the one or more antigens for a group of patients with prostate cancer, and
c) determining that the therapy is effective if the level of the one or more antigens in the patient is greater than the average level of the one or more antigens in the group of patients with prostate cancer.

27-30. (canceled)

31. A method of identifying and treating a prostate cancer patient previously treated with PROSTVAC vaccination or prostate antigen vaccination comprising:
a) determining the level of one or more antigens encoded by a gene listed in Table 4 having a positive value for r_in_PROSTVAC Progression-free survival by assaying the level of one or more antigens in a sample from a prostate cancer patient;
b) comparing the level of the one or more antigens with an average level of the one or more antigens for a group of patients with prostate cancer; and
c) administering the therapy or the vaccination with a prostate antigen if the level of the one or more antigens in the patient is greater than the average level of the one or more antigens in the group of patients with prostate cancer,
wherein the therapy comprises one or more of Ipilimumab administration, prostate antigen vaccination, and PROSTVAC therapy.

32-36. (canceled)

37. A method of identifying and treating a prostate cancer patient previously treated with PROSTVAC vaccination or prostate antigen vaccination comprising:
a) determining the level of one or more antigens encoded by a gene listed in Table 4 having a negative value for r_in_PROSTVAC Progression-free survival by assaying the level of one or more antigens in a sample from a prostate cancer patient;
b) comparing the level of the one or more antigens with an average level of the one or more antigens for a group of patients with prostate cancer; and
c) administering the therapy if the level of the one or more antigens in the patient is less than the average level of the one or more antigens in the group of patients with prostate cancer, wherein the therapy comprises one or more of Ipilimumab administration, prostate antigen vaccination, and PROSTVAC therapy.

38-42. (canceled)

43. A method of monitoring the effectiveness of PROSTVAC therapy in a prostate cancer patient previously treated with PROSTVAC therapy or vaccination with a prostate antigen comprising:
a) determining the level of one or more antigens encoded by a gene listed in Table 4 having a negative value for r_in_PROSTVAC Progression-free survival by assaying the level of one or more antigens in a sample from a prostate cancer patient;
b) comparing the level of the one or more antigens with an average level of the one or more antigens for a group of patients with prostate cancer; and
c) determining that the PROSTVAC therapy is effective if the level of the one or more antigens in the patient is less than the average level of the one or more antigens in the group of patients with prostate cancer.

44. A method of monitoring the effectiveness of PROSTVAC therapy in a prostate cancer patient previously treated with PROSTVAC therapy or vaccination with a prostate antigen comprising:
a) determining the level of one or more antigens encoded by a gene listed in Table 4 having a positive value for r_in_PROSTVAC Progression-free survival by assaying the level of one or more antigens in a sample from a prostate cancer patient;
b) comparing the level of the one or more antigens with an average level of the one or more antigens for a group of patients with prostate cancer; and
c) determining that the PROSTVAC therapy is effective if the level of the one or more antigens in the patient is greater than the average level of the one or more antigens in the group of patients with prostate cancer.

45-48. (canceled)

49. A method of assessing overall survival of a patient who has been treated with PROSTVAC comprising:
a) determining the level of one or more antigens encoded by a gene listed in Table 5 having a positive value for r_in_PROSTVAC Overall Survival by assaying the level of one or more antigens in a sample from a prostate cancer patient; and
b) comparing the level of the one or more antigens with an average level of the one or more antigens for a group of patients with prostate cancer.

50. A method of monitoring the effectiveness of combined PROSTVAC with Ipilimumab therapy in a prostate cancer patient previously treated with combined PROSTVAC with Ipilimumab therapy comprising:
a) determining the level of one or more antigens encoded by a gene listed in Table 6 having a positive value for r-value Study.Day by assaying the level of one or more antigens in a sample from a prostate cancer patient;
b) comparing the level of the one or more antigens with an average level of the one or more antigens for a group of patients with prostate cancer; and
c) determining that the combined PROSTVAC with Ipilimumab therapy is effective if the level of the one or more antigens in the patient is greater than the average level of the one or more antigens in the group of patients with prostate cancer.

51. A method of monitoring the effectiveness of combined PROSTVAC with Ipilimumab therapy in a prostate cancer patient previously treated with combined PROSTVAC with Ipilimumab therapy comprising:
a) determining the level of one or more antigens encoded by a gene listed in Table 7 having a positive value for r_in_prostvac_ipi_Best.Response by assaying the level of one or more antigens in a sample from a prostate cancer patient;
b) comparing the level of the one or more antigens with an average level of the one or more antigens for a group of patients with prostate cancer; and
c) determining that the combined PROSTVAC with Ipilimumab therapy is effective if the level of the one or more antigens in the patient is greater than the average level of the one or more antigens in the group of patients with prostate cancer.

52. A method of assessing overall survival of a patient who has been treated with PROSTVAC and Ipilimumab comprising:
a) determining the level of one or more antigens encoded by a gene listed in Table 8 having a positive value for r_in_prostvac_ipi_Overall.Survival by assaying the level of one or more antigens in a sample from a prostate cancer patient; and
b) comparing the level of the one or more antigens with an average level of the one or more antigens for a group of patients with prostate cancer.

53. A method of monitoring for immune-related adverse events arising from combined PROSTVAC with Ipilimumab therapy in a prostate cancer patient previously treated with combined PROSTVAC with Ipilimumab therapy comprising:
a) determining the level of one or more antigens encoded by a gene listed in Table 9 having a positive value for Pearson'r by assaying the level of one or more antigens in a sample from a prostate cancer patient;
b) comparing the level of the one or more antigens with an average level of the one or more antigens for a group of patients with prostate cancer; and
c) determining that there is risk for an immune-related adverse event arising from combined PROSTVAC with Ipilimumab therapy if the level of the one or more antigens in the patient is greater than the average level of the one or more antigens in the group of patients with prostate cancer.

The application's sequence listing, which the Patent Office published only in electronic form, follows.

SEQUENCE LISTING (368 sequences)

SEQ ID NO: 1 - protein, 403 aa, Homo sapiens [sequence omitted]

SEQ ID NO: 2 - protein, 144 aa, Homo sapiens
MWLQSLLLLGTVACSISAPARSPSPSTQPWEHVNAIQEARRLLNLSRDTAAEMNETVEVISEMFDLQEPTCLQTRLELYKQGLRGSLTKLKGPLTMMASHYKQHCPPTPETSCATQIITFESFKENLKDFLLVIPFDCWEPVQE

SEQ ID NO: 3 - protein, 380 aa, Homo sapiens
MSETVICSSRATVMLYDDGNKRWLPAGTGPQAFSRVQIYHNPTANSFRVVGRKMQPDQQVVINCAIVRGVKYNQATPNFHQWRDARQVWGLNFGSKEDAAQFAAGMASALEALEGGGPPPPPALPTWSVPNGPSPEEVEQQKRQQPGPSEHIERRVSNAGGPPAPPAGGPPPPPGPPPPPGPPPPPGLPPSGVPAAAHGAGGGPPPAPPLPAAQGPGGGGAGAPGLAAAIAGAKLRKVSKQEEASGGPTAPKAESGRSGGGGLMEEMNAMLARRRKATQVGEKTPKDESANQEEPEARVPAQSESVRRPWEKNSTTLPRMKSSSSVTTSETQPCTPSSSDYSDLQRVKQELLEEVKKELQKVKEEIIEAFVQELRKRGSP

SEQ ID NO: 4 - protein, 164 aa, Homo sapiens
MSEPAGDVRQNPCGSKACRRLFGPVDSEQLSRDCDALMAGCIQEARERWNFDFVTETPLEGDFAWERVRGLGLPKLYLPTGPRRGRDELGGGRRPGTSPALLQGTAEEDHVDLSLSCTLVPRSGEQAEGSPGGPGDSQGRKRRQTSMTDFYHSKRRLIFSKRKP

SEQ ID NO: 5 - protein, 614 aa, Homo sapiens
MSGYSSDRDRGRDRGFGAPRFGGSRAGPLSGKKFGNPGEKLVKKKWNLDELPKFEKNFYQEHPDLARRTAQEVETYRRSKEITVRGHNCPKPVLNFYEANFPANVMDVIARQNFTEPTAIQAQGWPVALSGLDMVGVAQTGSGKTLSYLLPAIVHINHQPFLERGDGPICLVLAPTRELAQQVQQVAAEYCRACRLKSTCIYGGAPKGPQIRDLERGVEICIATPGRLIDFLECGKTNLRRTTYLVLDEADRMLDMGFEPQIRKIVDQIRPDRQTLMWSATWPKEVRQLAEDFLKDYIHINIGALELSANHNILQIVDVCHDVEKDEKLIRLMEEIMSEKENKTIVFVETKRRCDELTRKMRRDGWPAMGIHGDKSQQERDWVLNEFKHGKAPILIATDVASRGLDVEDVKFVINYDYPNSSEDYIHRIGRTARSTKTGTAYTFFTPNNIKQVSDLISVLREANQAINPKLLQLVEDRGSGRSRGRGGMKDDRRDRYSAGKRGGFNTFRDRENYDRGYSSLLKRDFGAKTQNGVYSAANYTNGSFGSNFVSAGIQTSFRTGNPTGTYQNGYDSTQQYGSNVPNMHNGMNQQAYAYPATAAAPMIGYPMPTGYSQ

SEQ ID NO: 6 - protein, 240 aa, Homo sapiens [sequence omitted]

SEQ ID NO: 7 - protein, 189 aa, Homo sapiens
MASKRALVILAKGAEEMETVIPVDVMRRAGIKVTVAGLAGKDPVQCSRDVVICPDASLEDAKKEGPYDVVVLPGGNLGAQNLSESAAVKEILKEQENRKGLIAAICAGPTALLAHEIGFGSKVTTHPLAKDKMMNGGHYTYSENRVEKDGLILTSRGPGTSFEFALAIVEALNGKEVAAQVKAPLVLKD

SEQ ID NO: 8 - protein, 461 aa, Homo sapiens
MYNTVWSMDRDDADWREVMMPYSTELIFYIEMDPPALPPKPPKPMTSAVPNGMKDSSVSLQDAEWYWGDISREEVNDKLRDMPDGTFLVRDASTKMQGDYTLTLRKGGNNKLIKIYHRDGKYGFSDPLTFNSVVELINHYHHESLAQYNPKLDVKLMYPVSRYQQDQLVKEDNIDAVGKKLQEYHSQYQEKSKEYDRLYEEYTRTSQEIQMKRTAIEAFNETIKIFEEQCHTQEQHSKEYIERFRREGNEKEIERIMMNYDKLKSRLGEIHDSKMRLEQDLKNQALDNREIDKKMNSIKPDLIQLRKIRDQHLVWLNHKGVRQKRLNVWLGIKNEDADENYFINEEDENLPHYDEKTWFVEDINRVQAEDLLYGKPDGAFLIRESSKKGCYACSVVADGEVKHCVIYSTARGYGFAEPYNLYSSLKELVLHYQQTSLVQHNDSLNVRLAYPVHAQMPSLCR

SEQ ID NO: 9 - protein, 868 aa, Homo sapiens
MATFISVQLKKTSEVDLAKPLVKFIQQTYPSGGEEQAQYCRAAEELSKLRRAAVGRPLDKHEGALETLLRYYDQICSIEPKFPFSENQICLTFTWKDAFDKGSLFGGSVKLALASLGYEKSCVLFNCAALASQIAAEQNLDNDEGLKIAAKHYQFASGAFLHIKETVLSALSREPTVDISPDTVGTLSLIMLAQAQEVFFLKATRDKMKDAIIAKLANQAADYFGDAFKQCQYKDTLPKEVFPVLAAKHCIMQANAEYHQSILAKQQKKFGEEIARLQHAAELIKTVASRYDEYVNVKDFSDKINRALAAAKKDNDFIYHDRVPDLKDLDPIGKATLVKSTPVNVPISQKFTDLFEKMVPVSVQQSLAAYNQRKADLVNRSIAQMREATTLANGVLASLNLPAAIEDVSGDTVPQSILTKSRSVIEQGGIQTVDQLIKELPELLQRNREILDESLRLLDEEEATDNDLRAKFKERWQRTPSNELYKPLRAEGTNFRTVLDKAVQADGQVKECYQSHRDTIVLLCKPEPELNAAIPSANPAKTMQGSEVVNVLKSLLSNLDEVKKEREGLENDLKSVNFDMTSKFLTALAQDGVINEEALSVTELDRVYGGLTTKVQESLKKQEGLLKNIQVSHQEFSKMKQSNNEANLREEVLKNLATAYDNFVELVANLKEGTKFYNELTEILVRFQNKCSDIVFARKTERDELLKDLQQSIAREPSAPSIPTPAYQSSPAGGHAPTPPTPAPRTMPPTKPQPPARPPPPVLPANRAPSATAPSPVGAGTAAPAPSQTPGSAPPPQAQGPPYPTYPGYPGYCQMPMPMGYNPYAYGQYNMPYPPVYHQSPGQAPYPGPQQPSYPFPQPPQQSYYPQQ

SEQ ID NO: 10 - protein, 641 aa, Homo sapiens
MAKAAAIGIDLGTTYSCVGVFQHGKVEIIANDQGNRTTPSYVAFTDTERLIGDAAKNQVALNPQNTVFDAKRLIGRKFGDPVVQSDMKHWPFQVINDGDKPKVQVSYKGETKAFYPEEISSMVLTKMKEIAEAYLGYPVTNAVITVPAYFNDSQRQATKDAGVIAGLNVLRIINEPTAAAIAYGLDRTGKGERNVLIFDLGGGTFDVSILTIDDGIFEVKATAGDTHLGGEDFDNRLVNHFVEEFKRKHKKDISQNKRAVRRLRTACERAKRTLSSSTQASLEIDSLFEGIDFYTSITRARFEELCSDLFRSTLEPVEKALRDAKLDKAQIHDLVLVGGSTRIPKVQKLLQDFFNGRDLNKSINPDEAVAYGAAVQAAILMGDKSENVQDLLLLDVAPLSLGLETAGGVMTALIKRNSTIPTKQTQIFTTYSDNQPGVLIQVYEGERAMTKDNNLLGRFELSGIPPAPRGVPQIEVTFDIDANGILNVTATDKSTGKANKITITNDKGRLSKEEIERMVQEAEKYKAEDEVQRERVSAKNALESYAFNMKSAVEDEGLKGKISEADKKKVLDKCQEVISWLDANTLAEKDEFEHKRKELEQVCNPIISGLYQGAGGPGPGGFGAQGPKGGSGSGPTIEEVD

SEQ ID NO: 11 - protein, 483 aa, Homo sapiens
MSGGGPSGGGPGGSGRARTSSFAEPGGGGGGGGGGPGGSASGPGGTGGGKASVGAMGGGVGASSSGGGPGGSGGGGSGGPGAGTSFPPPGVKLGRDSGKVTTVVATLGQGPERSQEVAYTDIKVIGNGSFGVVYQARLAETRELVAIKKVLQDKRFKNRELQIMRKLDHCNIVRLRYFFYSSGEKKDELYLNLVLEYVPETVYRVARHFTKAKLTIPILYVKVYMYQLFRSLAYIHSQGVCHRDIKPQNLLVDPDTAVLKLCDFGSAKQLVRGEPNVSYICSRYYRAPELIFGATDYTSSIDVWSAGCVLAELLLGQPIFPGDSGVDQLVEIIKVLGTPTREQIREMNPNYTEFKFPQIKAHPWTKVFKSRTPPEAIALCSSLLEYTPSSRLSPLEACAHSFFDELRCLGTQLPNNRPLPPLFNFSAGELSIQPSLNAILIPPHLRSPAGTTTLTPSSQALTETPTSSDWQSTDATPTLTNSS

SEQ ID NO: 12 - protein, 198 aa, Homo sapiens
MSNVRVSNGSPSLERMDARQAEHPKPSACRNLFGPVDHEELTRDLEKHCRDMEEASQRKWNFDFQNHKPLEGKYEWQEVEKGSLPEFYYRPPRPPKGACKVPAQESQDVSGSRPAAPLIGAPANSEDTHLVDPKTDPSDSQTGLAEQCAGIRKRPATDDSSTQNKRANRTEENVSDGSPNAGSVEQTPKKPGLRRRQT

SEQ ID NO: 13 - protein, 226 aa, Homo sapiens
METVVIVAIGVLATIFLASFAALVLVCRQRYCRPRDLLQRYDSKPIVDLIGAMETQSEPSELELDDVVITNPHIEAILENEDWIEDASGLMSHCIAILKICHTLTEKLVAMTMGSGAKMKTSASVSDIIVVAKRISPRVDDVVKSMYPPLDPKLLDARTTALLLSVSHLVLVTRNACHLTGGLDWIDQSLSAAEEHLEVLREAALASEPDKGLPGPEGFLQEQSAI

SEQ ID NO: 14 - protein, 904 aa, Homo sapiens
MAESSESFTMASSPAQRRRGNDPLTSSPGRSSRRTDALTSSPGRDLPPFEDESEGLLGTEGPLEEEEDGEELIGDGMERDYRAIPELDAYEAEGLALDDEDVEELTASQREAAERAMRQRDREAGRGLGRMRRGLLYDSDEEDEERPARKRRQVERATEDGEEDEEMIESIENLEDLKGHSVREWVSMAGPRLEIHHRFKNFLRTHVDSHGHNVFKERISDMCKENRESLVVNYEDLAAREHVLAYFLPEAPAELLQIFDEAALEVVLAMYPKYDRITNHIHVRISHLPLVEELRSLRQLHLNQLIRTSGVVTSCTGVLPQLSMVKYNCNKCNFVLGPFCQSQNQEVKPGSCPECQSAGPFEVNMEETIYQNYQRIRIQESPGKVAAGRLPRSKDAILLADLVDSCKPGDEIELTGIYHNNYDGSLNTANGFPVFATVILANHVAKKDNKVAVGELTDEDVKMITSLSKDQQIGEKIFASIAPSIYGHEDIKRGLALALFGGEPKNPGGKHKVRGDINVLLCGDPGTAKSQFLKYIEKVSSRAIFTTGQGASAVGLTAYVQRHPVSREWTLEAGALVLADRGVCLIDEFDKMNDQDRTSIHEAMEQQSISISKAGIVTSLQARCTVIAAANPIGGRYDPSLTFSENVDLTEPIISRFDILCVVRDTVDPVQDEMLARFVVGSHVRHHPSNKEEEGLANGSAAEPAMPNTYGVEPLPQEVLKKYIIYAKERVHPKLNQMDQDKVAKMYSDLRKESMATGSIPITVRHIESMIRMAEAHARIHLRDYVIEDDVNMAIRVMLESFIDTQKFSVMRSMRKTFARYLSFRRDNNELLLFILKQLVAEQVTYQRNRFGAQQDTIEVPEKDLVDKARQINIHNLSAFYDSELFRMNKFSHDLKRKMILQQF

SEQ ID NO: 15 - protein, 1042 aa, Homo sapiens
MPMWAGGVGSPRRGMAPASTDDLFARKLRQPARPPLTPHTFEPRPVRGPLLRSGSDAGEARPPTPASPRARAHSHEEASRPAATSTRLFTDPLALLGLPAEEPEPAFPPVLEPRWFAHYDVQSLLFDWAPRSQGMGSHSEASSGTLASAEDQAASSDLLHGAPGFVCELGGEGELGLGGPASPPVPPALPNAAVSILEEPQNRTSAYSLEHADLGAGYYRKYFYGKEHQNFFGMDESLGPVAVSLRREEKEGSGGGTLHSYRVIVRTTQLRTLRGTISEDALPPGPPRGLSPRKLLEHVAPQLSPSCLRLGSASPKVPRTLLTLDEQVLSFQRKVGILYCRAGQGSEEEMYNNQEAGPAFMQFLTLLGDVVRLKGFESYRAQLDTKTDSTGTHSLYTTYQDHEIMFHVSTMLPYTPNNQQQLLRKRHIGNDIVTIVFQEPGSKPFCPTTIRSHFQHVFLVVRAHTPCTPHTTYRVAVSRTQDTPAFGPALPAGGGPFAANADFRAFLLAKALNGEQAAGHARQFHAMATRTRQQYLQDLATNEVTTTSLDSASRFGLPSLGGRRRAAPRGPGAELQAAGSLVWGVRAAPGARVAAGAQASGPEGIEVPCLLGISAEALVLVAPRDGRVVFNCACRDVLAWTFSEQQLDLYHGRGEAITLRFDGSPGQAVGEVVARLQLVSRGCETRELALPRDGQGRLGFEVDAEGFVTHVERFTFAETAGLRPGARLLRVCGQTLPSLRPEAAAQLLRSAPKVCVTVLPPDESGRPRRSFSELYTLSLQEPSRRGAPDPVQDEVQGVTLLPTTKQLLHLCLQDGGSPPGPGDLAEERTEFLHSQNSLSPRSSLSDEAPVLPNTTPDLLLATTAKPSVPSADSETPLTQDRPGSPSGSEDKGNPAPELRASFLPRTLSLRNSISRIMSEAGSGTLEDEWQAISEIASTCNTILESLSREGQPIPESGDPKGTPKSDAEPEPGNLSEKVSHLESMLRKLQEDLQKEKADRAALEEEVRSLRHNNRRLQAESESAATRLLLASKQLGSPTADLA

SEQ ID NO: 16 - protein, 709 aa, homo sapiens
MESPTKEIEEFESNSLKYLQPEQIEKIWLRLRGLRKYKKTSQRLRSLVKQLERGEASVVDLKKNLEYAATVLESVYIDETRRLLDTEDELSDIQSDAVPSEVRDWLASTFTRQMGMMLRRSDEKPRFKSIVHAVQAGIFVERMYRRTSNMVGLSYPPAVIEALKDVDKWSFDVFSLNEASGDHALKFIFYELLTRYDLISRFKIPISALVSFVEALEVGYSKHKNPYHNLMHAADVTQTVHYLLYKTGVANWLTELEIFAIIFSAAIHDYEHTGTTNNFHIQTRSDPAILYNDRSVLENHHLSAAYRLLQDDEEMNILINLSKDDWREFRTLVIEMVMATDMSCHFQQIKAMKTALQQPEAIEKPKALSLMLHTADISHPAKAWDLHHRWTMSLLEEFFRQGDREAELGLPFSPLCDRKSTMVAQSQVGFIDFIVEPTFTVLTDMTEKIVSPLIDETSQTGGTGQRRSSLNSISSSDAKRSGVKTSGSEGSAPINNSVISVDYKSFKATWTEVVHINRERWRAKVPKEEKAKKEAEEKARLAAEEQQKEMEAKSQAEEGASGKAEKKTSGETKNQVNGTRANKSDNPRGKNSKAEKSSGEQQQNGDFKDGKNKTDKKDHSNIGNDSKKTDGTKQRSHGSPAPSTSSTCRLTLPVIKPPLRHFKRPAYASSSYAPSVSKKTDEHPARYKMLDQRIKMKKIQNISHNWNRK

SEQ ID NO: 17 - protein, 1153 aa, Homo sapiens
MACPWKFLFKTKFHQYAMNGEKDINNNVEKAPCATSSPVTQDDLQYHNLSKQQNESPQPLVETGKKSPESLVKLDATPLSSPRHVRIKNWGSGMTFQDTLHHKAKGILTCRSKSCLGSIMTPKSLTRGPRDKPTPPDELLPQAIEFVNQYYGSFKEAKIEEHLARVEAVTKEIETTGTYQLTGDELIFATKQAWRNAPRCIGRIQWSNLQVFDARSCSTAREMFEHICRHVRYSTNNGNIRSAITVFPQRSDGKHDFRVWNAQLIRYAGYQMPDGSIRGDPANVEFTQLCIDLGWKPKYGRFDVVPLVLQANGRDPELFEIPPDLVLEVAMEHPKYEWFRELELKWYALPAVANMLLEVGGLEFPGCPFNGWYMGTEIGVRDFCDVQRYNILEEVGRRMGLETHKLASLWKDQAVVEINIAVLHSFQKQNVTIMDHHSAAESFMKYMQNEYRSRGGCPADWIWLVPPMSGSITPVFHQEMLNYVLSPFYYYQVEAWKTHVWQDEKRRPKRREIPLKVLVKAVLFACMLMRKTMASRVRVTILFATETGKSEALAWDLGALFSCAFNPKVVCMDKYRLSCLEEERLLLVVTSTFGNGDCPGNGEKLKKSLFMLKELNNKFRYAVFGLGSSMYPRFCAFAHDIDQKLSHLGASQLTPMGEGDELSGQEDAFRSWAVQTFKAACETFDVRGKQHIQIPKLYTSNVTWDPHHYRLVQDSQPLDLSKALSSMHAKNVFTMRLKSRQNLQSPTSSRATILVELSCEDGQGLNYLPGEHLGVCPGNQPALVQGILERVVDGPTPHQTVRLEALDESGSYWVSDKRLPPCSLSQALTYFLDITTPPTQLLLQKLAQVATEEPERQRLEALCQPSEYSKWKFTNSPTFLEVLEEFPSLRVSAGFLLSQLPILKPRFYSISSSRDHTPTEIHLTVAVVTYHTRDGQGPLHHGVCSTWLNSLKPQDPVPCFVRNASGFHLPEDPSHPCILIGPGTGIAPFRSFWQQRLHDSQHKGVRGGRMTLVFGCRRPDEDHIYQEEMLEMAQKGVLHAVHTAYSRLPGKPKVYVQDILRQQLASEVLRVLHKEPGHLYVCGDVRMARDVAHTLKQLVAAKLKLNEEQVEDYFFQLKSQKRYHEDIFGAVFPYEAKKDRVAVQPSSLEMSAL

SEQ ID NO: 18 - protein, 529 aa, Homo sapiens [sequence omitted]

SEQ ID NO: 19 - protein, 353 aa, Homo sapiens
MAMTLLEDWCRGMDVNSQRALLVWGIPVNCDEAEIEETLQAAMPQVSYRMLGRMFWREENAKAALLELTGAVDYAAIPREMPGKGGVWKVLFKPPTSDAEFLERLHLFLAREGWTVQDVARVLGFQNPTPTPGPEMPAEMLNYILDNVIQPLVESIWYKRLTLFSGRDIPGPGEETFDPWLEHTNEVLEEWQVSDVEKRRRLMESLRGPAADVIRILKSNNPAITTAECLKALEQVFGSVESSRDAQIKFLNTYQNPGEKLSAYVIRLEPLLQKVVEKGAIDKDNVNQARLEQVIAGANHSGAIRRQLWLTGAGEGPAPNLFQLLVQIREEEAKEEEEEAEATLLQLGLEGHF

SEQ ID NO: 20 - protein, 731 aa, Homo sapiens
MSGSRQAGSGSAGTSPGSSAASSVTSASSSLSSSPSPPSVAVSAAALVSGGVAQAAGSGGLGGPVRPVLVAPAVSGSGGGAVSTGLSRHSCAARPSAGVGGSSSSLGSGSRKRPLLAPLCNGLINSYEDKSNDFVCPICFDMIEEAYMTKCGHSFCYKCIHQSLEDNNRCPKCNYVVDNIDHLYPNFLVNELILKQKQRFEEKRFKLDHSVSSTNGHRWQIFQDWLGTDQDNLDLANVNLMLELLVQKKKQLEAESHAAQLQILMEFLKVARRNKREQLEQIQKELSVLEEDIKRVEEMSGLYSPVSEDSTVPQFEAPSPSHSSIIDSTEYSQPPGFSGSSQTKKQPWYNSTLASRRKRLTAHFEDLEQCYFSTRMSRISDDSRTASQLDEFQECLSKFTRYNSVRPLATLSYASDLYNGSSIVSSIEFDRDCDYFAIAGVTKKIKVYEYDTVIQDAVDIHYPENEMTCNSKISCISWSSYHKNLLASSDYEGTVILWDGFTGQRSKVYQEHEKRCWSVDFNLMDPKLLASGSDDAKVKLWSTNLDNSVASIEAKANVCCVKFSPSSRYHLAFGCADHCVHYYDLRNTKQPIMVFKGHRKAVSYAKFVSGEEIVSASTDSQLKLWNVGKPYCLRSFKGHINEKNFVGLASNGDYIACGSENNSLYLYYKGLSKTLLTFKFDTVKSVLDKDRKEDDTNEFVSAVCWRALPDGESNVLIAANSQGTIKVLELV

SEQ ID NO: 21 - protein, 413 aa, Homo sapiens [sequence omitted]

SEQ ID NO: 22 - protein, 579 aa, Homo sapiens
MLRSGPASGPSVPTGRAMPSRRVARPPAAPELGALGSPDLSSLSLAVSRSTDELEIIDEYIKENGFGLDGGQPGPGEGLPRLVSRGAASLSTVTLGPVAPPATPPPWGCPLGRLVSPAPGPGPQPHLVITEQPKQRGMRFRYECEGRSAGSILGESSTEASKTLPAIELRDCGGLREVEVTACLVWKDWPHRVHPHSLVGKDCTDGICRVRLRPHVSPRHSFNNLGIQCVRKKEIEAAIERKIQLGIDPYNAGSLKNHQEVDMNVVRICFQASYRDQQGQMRRMDPVLSEPVYDKKSTNTSELRICRINKESGPCTGGEELYLLCDKVQKEDISVVFSRASWEGRADFSQADVHRQIAIVFKTPPYEDLEIVEPVTVNVFLQRLTDGVCSEPLPFTYLPRDHDSYGVDKKRKRGMPDVLGELNSSDPHGIESKRRKKKPAILDHFLPNHGSGPFLPPSALLPDPDFFSGTVSLPGLEPPGGPDLLDDGFAYDPTAPTLFTMLDLLPPAPPHASAVVCSGGAGAVVGETPGPEPLTLDSYQAPGPGDGGTASLVGSNMFPNHYREAAFGGGLLSPGPEAT

SEQ ID NO: 23 - protein, 223 aa, Homo sapiens
MACLGFQRHKAQLNLATRTWPCTLLFFLLFIPVFCKAMHVAQPAVVLASSRGIASFVCEYASPGKATEVRVTVLRQADSQVTEVCAATYMMGNELTFLDDSICTGTSSGNQVNLTIQGLRAMDTGLYICKVELMYPPPYYLGIGNGTQIYVIDPEPCPDSDFLLWILAAVSSGLFFYSFLLTAVSLSKMLKKRSPLTTGVYVKMPPTEPECEKQFQPYFIPIN

SEQ ID NO: 24 - protein, 398 aa, Homo sapiens
MALLRRPTVSSDLENIDTGVNSKVKSHVTIRRTVLEEIGNRVTTRAAQVAKKAQNTKVPVQPTKTTNVNKQLKPTASVKPVQMEKLAPKGPSPTPEDVSMKEENLCQAFSDALLCKIEDIDNEDWENPQLCSDYVKDIYQYLRQLEVLQSINPHFLDGRDINGRMRAILVDWLVQVHSKFRLLQETLYMCVGIMDRFLQVQPVSRKKLQLVGITALLLASKYEEMFSPNIEDFVYITDNAYTSSQIREMETLILKELKFELGRPLPLHFLRRASKAGEVDVEQHTLAKYLMELTLIDYDMVHYHPSKVAAAASCLSQKVLGQGKWNLKQQYYTGYTENEVLEVMQHMAKNVVKVNENLTKFIAIKNKYASSKLLKISMIPQLNSKAVKDLASPLIGRS

SEQ ID NO: 25 - protein, 318 aa, Homo sapiens
MLLGQKSQRYKAEEGLQAQGEAPGLMDVQIPTAEEQKAASSSSTLIMGTLEEVTDSGSPSPPQSPEGASSSLTVTDSTLWSQSDEGSSSNEEEGPSTSPDPAHLESLFREALDEKVAELVRFLLRKYQIKEPVTKAEMLESVIKNYKNHFPDIFSKASECMQVIFGIDVKEVDPAGHSYILVTCLGLSYDGLLGDDQSTPKTGLLIIVLGMILMEGSRAPEEAIWEALSVMGLYDGREHSVYWKLRKLLTQEWVQENYLEYRQAPGSDPVRYEFLWGPRALAETSYVKVLEHVVRVNARVRISYPSLHEEALGEEKGV

SEQ ID NO: 26 - protein, 578 aa, Homo sapiens
MLRRLDKIRFRGHKRDDFLDLAESPNASDTECSDEIPLKVPRTSPRDSEELRDPAGPGTLIMATGVQDFNRTEFDRLNEIKGHLEIALLEKHFLQEELRKLREETNAEMLRQELDRERQRRMELEQKVQEVLKARTEEQMAQQPPKGQAQASNGAERRSQGLSSRLQKWFYERFGEYVEDFRFQPEENTVETEEPLSARRLTENMRRLKRGAKPVTNFVKNLSALSDWYSVYTSAIAFTVYMNAVWHGWAIPLFLFLAILRLSLNYLIARGWRIQWSIVPEVSEPVEPPKEDLTVSEKFQLVLDVAQKAQNLFGKMADILEKIKNLFMWVQPEITQKLYVALWAAFLASCFFPYRLVGLAVGLYAGIKFFLIDFIFKRCPRLRAKYDTPYIIWRSLPTDPQLKERSSAAVSRRLQTTSSRSYVPSAPAGLGKEEDAGRFHSTKKGNFHEIFNLTENERPLAVCENGWRCCLINRDRKMPTDYIRNGVLYVTENYLCFESSKSGSSKRNKVIKLVDITDIQKYKVLSVLPGSGMGIAVSTPSTQKPLVFGAMVHRDEAFETILSQYIKITSAAASGGDS

SEQ ID NO: 27 - protein, 266 aa, Homo sapiens
MVCLKLPGGSCMTALTVTLMVLSSPLALSGDTRPRFLWQPKRECHFFNGTERVRFLDRYFYNQEESVRFDSDVGEFRAVTELGRPDAEYWNSQKDILEQARAAVDTYCRHNYGVVESFTVQRRVQPKVTVYPSKTQPLQHHNLLVCSVSGFYPGSIEVRWFLNGQEEKAGMVSTGLIQNGDWTFQTLVMLETVPRSGEVYTCQVEHPSVTSPLTVEWRARSESAQSKMLSGVGGFVLGLLFLGAGLFIYFRNQKGHSGLQPTGFLS

SEQ ID NO: 28 - protein, 158 aa, Homo sapiens
MMQKLLKCSRLVLALALILVLESSVQGYPTRRARYQWVRCNPDSNSANCLEEKGPMFELLPGESNKIPRLRTDLFPKTRIQDLNRIFPLSEDYSGSGFGSGSGSGSGSGSGFLTEMEQDYQLVDESDAFHDNLRSLDRNLPSDSQDLGQHGLEEDFML

SEQ ID NO: 29 - protein, 188 aa, Homo sapiens
MNGDDAFVRRPRVGSQIPEKMQKAFDDIAKYFSEKEWEKMKASEKIIYVYMKRKYEAMTKLGFKATLPPFMRNKRVADFQGNDFDNDPNRGNQVEHPQMTFGRLQGIFPKITPEKPAEEGNDSKGVPEASGPQNNGKQLRPSGKLNTSEKVNKTSGPKRGKHAWTHRVRERKQLVIYEEISDPQEDDE

SEQ ID NO: 30 - protein, 937 aa, Homo sapiens
MTDSKYFTTNKKGEIFELKAELNNEKKEKRKEAVKKVIAAMTVGKDVSSLFPDVVNCMQTDNLELKKLVYLYLMNYAKSQPDMAIMAVNSFVKDCEDPNPLIRALAVRTMGCIRVDKITEYLCEPLRKCLKDEDPYVRKTAAVCVAKLHDINAQMVEDQGFLDSLRDLIADSNPMVVANAVAALSEISESHPNSNLLDLNPQNINKLLTALNECTEWGQIFILDCLSNYNPKDDREAQSICERVTPRLSHANSAVVLSAVKVLMKFLELLPKDSDYYNMLLKKLAPPLVTLLSGEPEVQYVALRNINLIVQKRPEILKQEIKVFFVKYNDPIYVKLEKLDIMIRLASQANIAQVLAELKEYATEVDVDFVRKAVRAIGRCAIKVEQSAERCVSTLLDLIQTKVNYVVQEAIVVIRDIFRKYPNKYESIIATLCENLDSLDEPDARAAMIWIVGEYAERIDNADELLESFLEGFHDESTQVQLTLLTAIVKLFLKKPSETQELVQQVLSLATQDSDNPDLRDRGYIYWRLLSTDPVTAKEVVLSEKPLISEETDLIEPTLLDELICHIGSLASVYHKPPNAFVEGSHGIHRKHLPIHHGSTDAGDSPVGTTTATNLEQPQVIPSQGDLLGDLLNLDLGPPVNVPQVSSMQMGAVDLLGGGLDSLVGQSFIPSSVPATFAPSPTPAVVSSGLNDLFELSTGIGMAPGGYVAPKAVWLPAVKAKGLEISGTFTHRQGHIYMEMNFTNKALQHMTDFAIQFNKNSFGVIPSTPLAIHTPLMPNQSIDVSLPLNTLGPVMKMEPLNNLQVAVKNNIDVFYFSCLIPLNVLFVEDGKMERQVFLATWKDIPNENELQFQIKECHLNADTVSSKLQNNNVYTIAKRNVEGQDMLYQSLKLTNGIWILAELRIQPGNPNYTLSLKCRAPEVSQYIYQVYDSILKN

SEQ ID NO: 31 - protein, 732 aa, Homo sapiens
MVRSGNKAAVVLCMDVGFTMSNSIPGIESPFEQAKKVITMFVQRQVFAENKDEIALVLFGTDGTDNPLSGGDQYQNITVHRHLMLPDFDLLEDIESKIQPGSQQADFLDALIVSMDVIQHETIGKKFEKRHIEIFTDLSSRFSKSQLDIIIHSLKKCDISLQFFLPFSLGKEDGSGDRGDGPFRLGGHGPSFPLKGITEQQKEGLEIVKMVMISLEGEDGLDEIYSFSESLRKLCVFKKIERHSIHWPCRLTIGSNLSIRIAAYKSILQERVKKTWTVVDAKTLKKEDIQKETVYCLNDDDETEVLKEDIIQGFRYGSDIVPFSKVDEEQMKYKSEGKCFSVLGFCKSSQVQRRFFMGNQVLKVFAARDDEAAAVALSSLIHALDDLDMVAIVRYAYDKRANPQVGVAFPHIKHNYECLVYVQLPFMEDLRQYMFSSLKNSKKYAPTEAQLNAVDALIDSMSLAKKDEKTDTLEDLFPTTKIPNPRFQRLFQCLLHRALHPREPLPPIQQHIWNMLNPPAEVTTKSQIPLSKIKTLFPLIEAKKKDQVTAQEIFQDNHEDGPTAKKLKTEQGGAHFSVSSLAEGSVTSVGSVNPAENFRVLVKQKKASFEEASNQLINHIEQFLDTNETPYFMKSIDCIRAFREEAIKFSEEQRFNNFLKALQEKVEIKQLNHFWEIVVQDGITLITKEEASGSSVTAEEAKKFLAPKDKPSGDTAAVFEEGGDVDDLLDMI

SEQ ID NO: 32 - protein, 569 aa, Homo sapiens
MKVLLRLICFIALLISSLEADKCKEREEKIILVSSANEIDVRPCPLNPNEHKGTITWYKDDSKTPVSTEQASRIHQHKEKLWFVPAKVEDSGHYYCVVRNSSYCLRIKISAKFVENEPNLCYNAQAIFKQKLPVAGDGGLVCPYMEFFKNENNELPKLQWYKDCKPLLLDNIHFSGVKDRLIVMNVAEKHRGNYTCHASYTYLGKQYPITRVIEFITLEENKPTRPVIVSPANETMEVDLGSQIQLICNVTGQLSDIAYWKWNGSVIDEDDPVLGEDYYSVENPANKRRSTLITVLNISEIESRFYKHPFTCFAKNTHGIDAAYIQLIYPVTNFQKHMIGICVTLTVIIVCSVFIYKIFKIDIVLWYRDSCYDFLPIKASDGKTYDAYILYPKTVGEGSTSDCDIFVFKVLPEVLEKQCGYKLFIYGRDDYVGEDIVEVINENVKKSRRLIIILVRETSGFSWLGGSSEEQIAMYNALVQDGIKVVLLELEKIQDYEKMPESIKFIKQKHGAIRWSGDFTQGPQSAKTRFWKNVRYHMPVQRRSPSSKHQLLSPATKEKLQREAHVPLG

SEQ ID NO: 33 - protein, 437 aa, Homo sapiens
MTQFLPPNLLALFAPRDPIPYLPPLEKLPHEKHHNQPYCGIAPYIREFEDPRDAPPPTRAETREERMERKRREKIERRQQEVETELKMWDPHNDPNAQGDAFKTLFVARVNYDTTESKLRREFEVYGPIKRIHMVYSKRSGKPRGYAFIEYEHERDMHSAYKHADGKKIDGRRVLVDVERGRTVKGWRPRRLGGGLGGTRRGGADVNIRHSGRDDTSRYDERPGPSPLPHRDRDRDRERERRERSRERDKERERRRSRSRDRRRRSRSRDKEERRRSRERSKDKDRDRKRRSSRSRERARRERERKEELRGGGGDMAEPSEAGDAPPDDGPPGELGPDGPDGPEEKGRDRDRERRRSHRSERERRRDRDRDRDRDREHKRGERGSERGRDEARGGGGGQDNGLEGLGNDSRDMYMESEGGDGYLAPENGYLMEAAPE

SEQ ID NO: 34 - protein, 453 aa, Homo sapiens
MLSRSRCVSRAFSRSLSAFQKGNCPLGRRSLPGVSLCQGPGYPNSRKVVINNSVFSVRFFRTTAVCKDDLVTVKTPAFAESVTEGDVRWEKAVGDTVAEDEVVCEIETDKTSVQVPSPANGVIEALLVPDGGKVEGGTPLFTLRKTGAAPAKAKPAEAPAAAAPKAEPTAAAVPPPAAPIPTQMPPVPSPSQPPSGKPVSAVKPTVAPPLAEPGAGKGLRSEHREKMNRMRQRIAQRLKEAQNTCAMLTTFNEIDMSNIQEMRARHKEAFLKKHNLKLGFMSAFVKASAFALQEQPVVNAVIDDTTKEVVYRDYIDISVAVATPRGLVVPVIRNVEAMNFADIERTITELGEKARKNELAIEDMDGGTFTISNGGVFGSLFGTPIINPPQSAILGMHGIFDRPVAIGGKVEVRPMMYVALTYDHRLIDGREAVTFLRKIKAAVEDPRVLLLDL

SEQ ID NO: 35 - protein, 716 aa, Homo sapiens
MGETKIIYHLDGQETPYLVKLPLPAERVTLADFKGVLQRPSYKFFFKSMDDDFGVVKEEISDDNAKLPCFNGRVVSWLVSAEGSHPDPAPFCADNPSELPPPMERTGGIGDSRPPSFHPHAGGGSQENLDNDTETDSLVSAQRERPRRRDGPEHATRLNGTAKGERRREPGGYDSSSTLMSSELETTSFFDSDEDDSTSRFSSSTEQSSASRLMRRHKRRRRKQKVSRIERSSSFSSITDSTMSLNIITVTLNMEKYNFLGISIVGQSNERGDGGIYIGSIMKGGAVAADGRIEPGDMLLQVNEINFENMSNDDAVRVLREIVHKPGPITLTVAKCWDPSPRGCFTLPRSEPIRPIDPAAWVSHTAAMTGTFPAYGMSPSLSTITSTSSSITSSIPDTERLDDFHLSIHSDMAAIVKAMASPESGLEVRDRMWLKITIPNAFIGSDVVDWLYHNVEGFTDRREARKYASNLLKAGFIRHTVNKITFSEQCYYIFGDLCGNMANLSLHDHDGSSGASDQDTLAPLPHPGAAPWPMAFPYQYPPPPHPYNPHPGFPELGYSYGGGSASSQHSEGSRSSGSNRSGSDRRKEKDPKAGDSKSGGSGSESDHTTRSSLRGPRERAPSERSGPAASEHSHRSHHSLASSLRSHHTHPSYGPPGVPPLYGPPMLMMPPPPAAMGPPGAPPGRDLASVPPELTASRQSFRMAMGNPSEFFVDVM

SEQ ID NO: 36 - protein, 280 aa, Homo sapiens
MPADIMEKNSSSPVAATPASVNTTPDKPKTASEHRKSSKPIMEKRRRARINESLSQLKTLILDALKKDSSRHSKLEKADILEMTVKHLRNLQRAQMTAALSTDPSVLGKYRAGFSECMNEVTRFLSTCEGVNTEVRTRLLGHLANCMTQINAMTYPGQPHPALQAPPPPPPGPGGPQHAPFAPPPPLVPIPGGAAPPPGGAPCKLGSQAGEAAKVFGGFQVVPAPDGQFAFLIPNGAFAHSGPVIPVYTSNSGTSVGPNAVSPSSGPSLTADSMWRPWRN

SEQ ID NO: 37 - protein, 942 aa, Homo sapiens
MASDAVQSEPRSWSLLEQLGLAGADLAAPGVQQQLELERERLRREIRKELKLKEGAENLRRATTDLGRSLGPVELLLRGSSRRLDLLHQQLQELHAHVVLPDPAATHDGPQSPGAGGPTCSATNLSRVAGLEKQLAIELKVKQGAENMIQTYSNGSTKDRKLLLTAQQMLQDSKTKIDIIRMQLRRALQAGQLENQAAPDDTQGSPDLGAVELRIEELRHHFRVEHAVAEGAKNVLRLLSAAKAPDRKAVSEAQEKLTESNQKLGLLREALERRLGELPADHPKGRLLREELAAASSAAFSTRLAGPFPATHYSTLCKPAPLTGTLEVRVVGCRDLPETIPWNPTPSMGGPGTPDSRPPFLSRPARGLYSRSGSLSGRSSLKAEAENTSEVSTVLKLDNTVVGQTSWKPCGPNAWDQSFTLELERARELELAVFWRDQRGLCALKFLKLEDFLDNERHEVQLDMEPQGCLVAEVTFRNPVIERIPRLRRQKKIFSKQQGKAFQRARQMNIDVATWVRLLRRLIPNATGTGTFSPGASPGSEARTTGDISVEKLNLGTDSDSSPQKSSRDPPSSPSSLSSPIQESTAPELPSETQETPGPALCSPLRKSPLTLEDFKFLAVLGRGHFGKVLLSEFRPSGELFAIKALKKGDIVARDEVESLMCEKRILAAVTSAGHPFLVNLFGCFQTPEHVCFVMEYSAGGDLMLHIHSDVFSEPRAIFYSACVVLGLQFLHEHKIVYRDLKLDNLLLDTEGYVKIADFGLCKEGMGYGDRTSTFCGTPEFLAPEVLTDTSYTRAVDWWGLGVLLYEMLVGESPFPGDDEEEVFDSIVNDEVRYPRFLSAEAIGIMRRLLRRNPERRLGSSERDAEDVKKQPFFRTLGWEALLARRLPPPFVPTLSGRTDVSNFDEEFTGEAPTLSPPRDARPLTAAEQAAFLDFDFVAGGC

SEQ ID NO: 38 - protein, 505 aa, Homo sapiens
MSYPGYPPPPGGYPPAAPGGGPWGGAAYPPPPSMPPIGLDNVATYAGQFNQDYLSGMAANMSGTFGGANMPNLYPGAPGAGYPPVPPGGFGQPPSAQQPVPPYGMYPPPGGNPPSRMPSYPPYPGAPVPGQPMPPPGQQPPGAYPGQPPVTYPGQPPVPLPGQQQPVPSYPGYPGSGTVTPAVPPTQFGSRGTITDAPGFDPLRDAEVLRKAMKGFGTDEQAIIDCLGSRSNKQRQQILLSFKTAYGKDLIKDLKSELSGNFEKTILALMKTPVLFDIYEIKEAIKGVGTDEACLIEILASRSNEHIRELNRAYKAEFKKTLEEAIRSDTSGHFQRLLISLSQGNRDESTNVDMSLAQRDAQELYAAGENRLGTDESKFNAVLCSRSRAHLVAVFNEYQRMTGRDIEKSICREMSGDLEEGMLAVVKCLKNTPAFFAERLNKAMRGAGTKDRTLIRIMVSRSETDLLDIRSEYKRMYGKSLYHDISGDTSGDYRKILLKICGGND

SEQ ID NO: 39 - protein, 426 aa, Homo sapiens
MPLLWLRGFLLASCWIIVRSSPTPGSEGHSAAPDCPSCALAALPKDVPNSQPEMVEAVKKHILNMLHLKKRPDVTQPVPKAALLNAIRKLHVGKVGENGYVEIEDDIGRRAEMNELMEQTSEIITFAESGTARKTLHFEISKEGSDLSVVERAEVWLFLKVPKANRTRTKVTIRLFQQQKHPQGSLDTGEEAEEVGLKGERSELLLSEKVVDARKSTWHVFPVSSSIQRLLDQGKSSLDVRIACEQCQESGASLVLLGKKKKKEEEGEGKKKGGGEGGAGADEEKEQSHRPFLMLQARQSEDHPHRRRRRGLECDGKVNICCKKQFFVSFKDIGWNDWIIAPSGYHANYCEGECPSHIAGTSGSSLSFHSTVINHYRMRGHSPFANLKSCCVPTKLRPMSMLYYDDGQNIIKKDIQNMIVEECGCS

SEQ ID NO: 40 - protein, 481 aa, Homo sapiens
MNEVSVIKEGWLHKRGEYIKTWRPRYFLLKSDGSFIGYKERPEAPDQTLPPLNNFSVAECQLMKTERPRPNTFVIRCLQWTTVIERTFHVDSPDEREEWMRAIQMVANSLKQRAPGEDPMDYKCGSPSDSSTTEEMEVAVSKARAKVTMNDFDYLKLLGKGTFGKVILVREKATGRYYAMKILRKEVIIAKDEVAHTVTESRVLQNTRHPFLTALKYAFQTHDRLCFVMEYANGGELFFHLSRERVFTEERARFYGAEIVSALEYLHSRDVVYRDIKLENLMLDKDGHIKITDFGLCKEGISDGATMKTFCGTPEYLAPEVLEDNDYGRAVDWWGLGVVMYEMMCGRLPFYNQDHERLFELILMEEIRFPRTLSPEAKSLLAGLLKKDPKQRLGGGPSDAKEVMEHRFFLSINWQDVVQKKLLPPFKPQVTSEVDTRYFDDEFTAQSITITPPDRYDSLGLLELDQRTHFPQFSYSASIRE

SEQ ID NO: 41 - protein, 870 aa, Homo sapiens
MGNRGMEELIPLVNKLQDAFSSIGQSCHLDLPQIAVVGGQSAGKSSVLENFVGRDFLPRGSGIVTRRPLILQLIFSKTEHAEFLHCKSKKFTDFDEVRQEIEAETDRVTGTNKGISPVPINLRVYSPHVLNLTLIDLPGITKVPVGDQPPDIEYQIKDMILQFISRESSLILAVTPANMDLANSDALKLAKEVDPQGLRTIGVITKLDLMDEGTDARDVLENKLLPLRRGYIGVVNRSQKDIEGKKDIRAALAAERKFFLSHPAYRHMADRMGTPHLQKTLNQQLTNHIRESLPALRSKLQSQLLSLEKEVEEYKNFRPDDPTRKTKALLQMVQQFGVDFEKRIEGSGDQVDTLELSGGARINRIFHERFPFELVKMEFDEKDLRREISYAIKNIHGVRTGLFTPDLAFEAIVKKQVVKLKEPCLKCVDLVIQELINTVRQCTSKLSSYPRLREETERIVTTYIREREGRTKDQILLLIDIEQSYINTNHEDFIGFANAQQRSTQLNKKRAIPNQGEILVIRRGWLTINNISLMKGGSKEYWFVLTAESLSWYKDEEEKEKKYMLPLDNLKIRDVEKGFMSNKHVFAIFNTEQRNVYKDLRQIELACDSQEDVDSWKASFLRAGVYPEKDQAENEDGAQENTFSMDPQLERQVETIRNLVDSYVAIINKSIRDLMPKTIMHLMINNTKAFIHHELLAYLYSSADQSSLMEESADQAQRRDDMLRMYHALKEALNIIGDISTSTVSTPVPPPVDDTWLQSASSHSPTPQRRPVSSIHPPGRPPAVRGPTPGPPLIPVPVGAAASFSAPPIPSRPGPQSVFANSDLFPAPPQIPSRPVRIPPGIPPGVPSRRPPAAPSRPTIIRPAEPSLLD

SEQ ID NO: 42 - protein, 116 aa, Homo sapiens
MSWRGRSTYRPRPRRYVEPPEMIGPMRPEQFSDEVEPATPEEGEPATQRQDPAAAQEGEDEGASAGQGPKPEAHSQEQGHPQTGCECEDGPDGQEMDPPNPEEVKTPEEGEKQSQC

SEQ ID NO: 43 - protein, 116 aa, Homo sapiens
MSWRGRSTYRPRPRRYVEPPEMIGPMRPEQFSDEVEPATPEEGEPATQRQDPAAAQEGEDEGASAGQGPKPEADSQEQGHPQTGCECEDGPDGQEMDPPNPEEVKTPEEGEKQSQC

SEQ ID NO: 44 - protein, 110 aa, Homo sapiens
MSWRGRSTYYWPRPRRYVQPPEMIGPMRPEQFSDEVEPATPEEGEPATQRQDPAAAQEGEDEGASAGQGPKPEAHSQEQGHPQTGCECEDGPDGQEMDPPNPEEVKTPEE

SEQ ID NO: 45 - protein, 735 aa, Homo sapiens
MPLAQLKEPWPLMELVPLDPENGQTSGEEAGLQPSKDEGVLKEISITHHVKAGSEKADPSHFELLKVLGQGSFGKVFLVRKVTRPDSGHLYAMKVLKKATLKVRDRVRTKMERDILADVNHPFVVKLHYAFQTEGKLYLILDFLRGGDLFTRLSKEVMFTEEDVKFYLAELALGLDHLHSLGIIYRDLKPENILLDEEGHIKLTDFGLSKEAIDHEKKAYSFCGTVEYMAPEVVNRQGHSHSADWWSYGVLMFEMLTGSLPFQGKDRKETMTLILKAKLGMPQFLSTEAQSLLRALFKRNPANRLGSGPDGAEEIKRHVFYSTIDWNKLYRREIKPPFKPAVAQPDDTFYFDTEFTSRTPKDSPGIPPSAGAHQLFRGFSFVATGLMEDDGKPRAPQAPLHSVVQQLHGKNLVFSDGYVVKETIGVGSYSECKRCVHKATNMEYAVKVIDKSKRDPSEEIEILLRYGQHPNIITLKDVYDDGKHVYLVTELMRGGELLDKILRQKFFSEREASFVLHTIGKTVEYLHSQGVVHRDLKPSNILYVDESGNPECLRICDFGFAKQLRAENGLLMTPCYTANFVAPEVLKRQGYDEGCDIWSLGILLYTMLAGYTPFANGPSDTPEEILTRIGSGKFTLSGGNWNTVSETAKDLVSKMLHVDPHQRLTAKQVLQHPWVTQKDKLPQSQLSHQDLQLVKGAMAATYSALNSSKPTPQLKPIESSILAQRRVRKLPSTTL

SEQ ID NO: 46 - protein, 695 aa, Homo sapiens
MADIKTGIFAKNVQKRLNRAQEKVLQKLGKADETKDEQFEEYVQNFKRQEAEGTRLQRELRGYLAAIKGMQEASMKLTESLHEVYEPDWYGREDVKMVGEKCDVLWEDFHQKLVDGSLLTLDTYLGQFPDIKNRIAKRSRKLVDYDSARHHLEALQSSKRKDESRISKAEEEFQKAQKVFEEFNVDLQEELPSLWSRRVGFYVNTFKNVSSLEAKFHKEIAVLCHKLYEVMTKLGDQHADKAFTIQGAPSDSGPLRIAKTPSPPEEPSPLPSPTASPNHTLAPASPAPARPRSPSQTRKGPPVPPLPKVTPTKELQQENIISFFEDNFVPEISVTTPSQNEVPEVKKEETLLDLDFDPFKPEVTPAGSAGVTHSPMSQTLPWDLWTTSTDLVQPASGGSFNGFTQPQDTSLFTMQTDQSMICNLAESEQAPPTEPKAEEPLAAVTPAVGLDLGMDTRAEEPVEEAVIIPGADADAAVGTLVSAAEGAPGEEAEAEKATVPAGEGVSLEEAKIGTETTEGAESAQPEAEELEATVPQEKVIPSVVIEPASNHEEEGENEITIGAEPKETTEDAAPPGPTSETPELATEQKPIQDPQPTPSAPAMGAADQLASAREASQELPPGFLYKVETLHDFEAANSDELTLQRGDVVLVVPSDSEADQDAGWLVGVKESDWLQYRDLATYKGLFPENFTRRLD

SEQ ID NO: 47 - protein, 155 aa, Homo sapiens
MKVASGSTATAAAGPSCALKAGKTASGAGEVVRCLSEQSVAISRCAGGAGARLPALLDEQQVNVLLYDMNGCYSRLKELVPTLPQNRKVSKVEILQHVIDYIRDLQLELNSESEVGTPGGRGLPVRAPLSTLNGEISALTAEAACVPADDRILCR

SEQ ID NO: 48 - protein, 135 aa, Homo sapiens
MACGLVASNLNLKPGECLRVRGEVAPDAKSFVLNLGKDSNNLCLHFNPRFNAHGDANTIVCNSKDGGAWGTEQREAVFPFQPGSVAEVCITFDQANLTVKLPDGYEFKFPNRLNLEAINYMAADGDFKIKCVAFD

SEQ ID NO: 49 - protein, 429 aa, Homo sapiens
MSRDPGSGGWEEAPRAAAALCTLYHEAGQRLRRLQDQLAARDALIARLRARLAALEGDAAPSLVDALLEQVARFREQLRRQEGGAAEAQMRQEIERLTERLEEKEREMQQLLSQPQHEREKEVVLLRRSMAEGERARAASDVLCRSLANETHQLRRTLTATAHMCQHLAKCLDERQHAQRNVGERSPDQSEHTDGHTSVQSVIEKLQEENRLLKQKVTHVEDLNAKWQRYNASRDEYVRGLHAQLRGLQIPHEPELMRKEISRLNRQLEEKINDCAEVKQELAASRTARDAALERVQMLEQQILAYKDDFMSERADRERAQSRIQELEEKVASLLHQVSWRQDSREPDAGRIHAGSKTAKYLAADALELMVPGGWRPGTGSQQPEPPAEGGHPGAAQRGQGDLQCPHCLQCFSDEQGEELLRHVAECCQ

SEQ ID NO: 50 - protein, 641 aa, Homo sapiens
MATAKGIAIGIDLGTTYSCVGVFQHGKVEIIANDQGNRTTPSYVAFTDTERLIGDAAKNQVAMNPQNTVFDAKRLIGRKFNDPVVQADMKLWPFQVINEGGKPKVLVSYKGENKAFYPEEISSMVLTKLKETAEAFLGHPVTNAVITVPAYFNDSQRQATKDAGVIAGLNVLRIINEPTAAAIAYGLDKGGQGERHVLIFDLGGGTFDVSILTIDDGIFEVKATAGDTHLGGEDFDNRLVSHFVEEFKRKHKKDISQNKRAVRRLRTACERAKRTLSSSTQANLEIDSLYEGIDFYTSITRARFEELCADLFRGTLEPVEKALRDAKMDKAKIHDIVLVGGSTRIPKVQRLLQDYFNGRDLNKSINPDEAVAYGAAVQAAILMGDKSEKVQDLLLLDVAPLSLGLETAGGVMTALIKRNSTIPTKQTQIFTTYSDNQPGVLIQVYEGERAMTKDNNLLGRFDLTGIPPAPRGVPQIEVTFDIDANGILNVTATDKSTGKVNKITITNDKGRLSKEEIERMVLDAEKYKAEDEVQREKIAAKNALESYAFNMKSVVSDEGLKGKISESDKNKILDKCNELLSWLEVNQLAEKDEFDHKRKELEQMCNPIITKLYQGGCTGPACGTGYVPGRPATGPTIEEVD

SEQ ID NO: 51 - protein, 181 aa, Homo sapiens
LWLKFHRHQTEMIITKQGRRMFPFLSFNINGLNPTAHYNVFVEVVLADPNHWRFQGGKWVTCGKADNNMQGNKMYVHPESPNTGSHWMRQEISFGKLKLTNNKGANNNNTQMIVLQSLHKYQPRLHIVEVTEDGVEDLNEPSKTQTFTFSETQFIAVTAYQNTDITQLKIDHNPFAKGFRD

SEQ ID NO: 52 - protein, 556 aa, Homo sapiens
MGFWILAILTILMYSTAAKFSKQSWGLENEALIVRCPRQGKPSYTVDWYYSQTNKSIPTQERNRVFASGQLLKFLPAAVADSGIYTCIVRSPTFNRTGYANVTIYKKQSDCNVPDYLMYSTVSGSEKNSKIYCPTIDLYNWTAPLEWFKNCQALQGSRYRAHKSFLVIDNVMTEDAGDYTCKFIHNENGANYSVTATRSFTVKDEQGFSLFPVIGAPAQNEIKEVEIGKNANLTCSACFGKGTQFLAAVLWQLNGTKITDFGEPRIQQEEGQNQSFSNGLACLDMVLRIADVKEEDLLLQYDCLALNLHGLRRHTVRLSRKNPIDHHSIYCIIAVCSVFLMLINVLVIILKMFWIEATLLWRDIAKPYKTRNDGKLYDAYVVYPRNYKSSTDGASRVEHFVHQILPDVLENKCGYTLCIYGRDMLPGEDVVTAVETNIRKSRRHIFILTPQITHNKEFAYEQEVALHCALIQNDAKVILIEMEALSELDMLQAEALQDSLQHLMKVQGTIKWREDHIANKRSLNSKFWKHVRYQMPVPSKIPRKASSLTPLAAQKQ

SEQ ID NO: 53 - protein, 493 aa, Homo sapiens
MTANGTAEAVQIQFGLINCGNKYLTAEAFGFKVNASASSLKKKQIWTLEQPPDEAGSAAVCLRSHLGRYLAADKDGNVTCEREVPGPDCRFLIVAHDDGRWSLQSEAHRRYFGGTEDRLSCFAQTVSPAEKWSVHIAMHPQVNIYSVTRKRYAHLSARPADEIAVDRDVPWGVDSLITLAFQDQRYSVQTADHRFLRHDGRLVARPEPATGYTLEFRSGKVAFRDCEGRYLAPSGPSGTLKAGKATKVGKDELFALEQSCAQVVLQAANERNVSTRQGMDLSANQDEETDQETFQLEIDRDTKKCAFRTHTGKYWTLTATGGVQSTASSKNASCYFDIEWRDRRITLRASNGKFVTSKKNGQLAASVETAGDSELFLMKLINRPIIVFRGEHGFIGCRKVTGTLDANRSSYDVFQLEFNDGAYNIKDSTGKYWTVGSDSAVTSSGDTPVDFFFEFCDYNKVAIKVGGRYLKGDHAGVLKASAETVDPASLWEY

SEQ ID NO: 54 - protein, 490 aa, Homo sapiens
MKPKLMYQELKVPAEEPANELPMNEIEAWKAAEKKARWVLLVLILAVVGFGALMTQLFLWEYGDLHLFGPNQRPAPCYDPCEAVLVESIPEGLDFPNASTGNPSTSQAWLGLLAGAHSSLDIASFYWTLTNNDTHTQEPSAQQGEEVLRQLQTLAPKGVNVRIAVSKPSGPQPQADLQALLQSGAQVRMVDMQKLTHGVLHTKFWVVDQTHFYLGSANMDWRSLTQVKELGVVMYNCSCLARDLTKIFEAYWFLGQAGSSIPSTWPRFYDTRYNQETPMEICLNGTPALAYLASAPPPLCPSGRTPDLKALLNVVDNARSFIYVAVMNYLPTLEFSHPHRFWPAIDDGLRRATYERGVKVRLLISCWGHSEPSMRAFLLSLAALRDNHTHSDIQVKLFVVPADEAQARIPYARVNHNKYMVTERATYIGTSNWSGNYFTETAGTSLLVTQNGRGGLRSQLEAIFLRDWDSPYSHDLDTSADSVGNACRLL

SEQ ID NO: 55 - protein, 1243 aa, Homo sapiens [sequence omitted]

SEQ ID NO: 56 - protein, 819 aa, Homo sapiens
MSGTSKESLGHGGLPGLGKTCLTTMDTKLNMLNEKVDQLLHFQEDVTEKLQSMCRDMGHLERGLHRLEASRAPGPGGADGVPHIDTQAGWPEVLELVRAMQQDAAQHGARLEALFRMVAAVDRAIALVGATFQKSKVADFLMQGRVPWRRGSPGDSPEENKERVEEEGGKPKHVLSTSGVQSDAREPGEESQKADVLEGTAERLPPIRASGLGADPAQAVVSPGQGDGVPGPAQAFPGHLPLPTKVEAKAPETPSENLRTGLELAPAPGRVNVVSPSLEVAPGAGQGASSSRPDPEPLEEGTRLTPGPGPQCPGPPGLPAQARATHSGGETPPRISIHIQEMDTPGEMLMTGRGSLGPTLTTEAPAAAQPGKQGPPGTGRCLQAPGTEPGEQTPEGARELSPLQESSSPGGVKAEEEQRAGAEPGTRPSLARSDDNDHEVGALGLQQGKSPGAGNPEPEQDCAARAPVRAEAVRRMPPGAEAGSVVLDDSPAPPAPFEHRVVSVKETSISAGYEVCQHEVLGGGRFGQVHRCTEKSTGLPLAAKIIKVKSAKDREDVKNEINIMNQLSHVNLIQLYDAFESKHSCTLVMEYVDGGELFDRITDEKYHLTELDVVLFTRQICEGVHYLHQHYILHLDLKPENILCVNQTGHQIKIIDFGLARRYKPREKLKVNFGTPEFLAPEVVNYEFVSFPTDMWSVGVITYMLLSGLSPFLGETDAETMNFIVNCSWDFDADTFEGLSEEAKDFVSRLLVKEKSCRMSATQCLKHEWLNNLPAKASRSKTRLKSQLLLQKYIAQRKWKKHFYVVTAANRLRKFPTSP

SEQ ID NO: 57 - protein, 819 aa, Homo sapiens; identical to SEQ ID NO: 56

SEQ ID NO: 58 - protein, 934 aa, Homo sapiens [sequence omitted]

SEQ ID NO: 59 - protein, 248 aa, Homo sapiens
MAELDPFGAPAGAPGGPALGNGVAGAGEEDPAAAFLAQQESEIAGIENDEAFAILDGGAPGPQPHGEPPGGPDAVDGVMNGEYYQESNGPTDSYAAISQVDRLQSEPESIRKWREEQMERLEALDANSRKQEAEWKEKAIKELEEWYARQDEQLQKTKANNRVADEAFYKQPFADVIGYVTNINHPCYSLEQAAEEAFVNDIDESSPGTEWERVARLCDFNPKSSKQAKDVSRMRSVLISLKQAPLVH

SEQ ID NO: 60 - protein, 646 aa, Homo sapiens
MSKGPAVGIDLGTTYSCVGVFQHGKVEIIANDQGNRTTPSYVAFTDTERLIGDAAKNQVAMNPTNTVFDAKRLIGRRFDDAVVQSDMKHWPFMVVNDAGRPKVQVEYKGETKSFYPEEVSSMVLTKMKEIAEAYLGKTVTNAVVTVPAYFNDSQRQATKDAGTIAGLNVLRIINEPTAAAIAYGLDKKVGAERNVLIFDLGGGTFDVSILTIEDGIFEVKSTAGDTHLGGEDFDNRMVNHFIAEFKRKHKKDISENKRAVRRLRTACERAKRTLSSSTQASIEIDSLYEGIDFYTSITRARFEELNADLFRGTLDPVEKALRDAKLDKSQIHDIVLVGGSTRIPKIQKLLQDFFNGKELNKSINPDEAVAYGAAVQAAILSGDKSENVQDLLLLDVTPLSLGIETAGGVMTVLIKRNTTIPTKQTQTFTTYSDNQPGVLIQVYEGERAMTKDNNLLGKFELTGIPPAPRGVPQIEVTFDIDANGILNVSAVDKSTGKENKITITNDKGRLSKEDIERMVQEAEKYKAEDEKQRDKVSSKNSLESYAFNMKATVEDEKLQGKINDEDKQKILDKCNEIINWLDKNQTAEKEEFEHQQKELEKVCNPIITKLYQSAGGMPGGMPGGFPGGGAPPSGGASSGPTIEEVD

SEQ ID NO: 61 - protein, 240 aa, Homo sapiens
MKVKKGGGGAGTATESAPGPSGQSVAPIPQPPAESESGSESEPDAGPGPRPGPLQRKQPIGPEDVLGLQRITGDYLCSPEENIYKIDFVRFKIRDMDSGTVLFEIKKPPVSERLPINRRDLDPNAGRFVRYQFTPAFLRLRQVGATVEFTVGDKPVNNFRMIERHYFRNQLLKSFDFHFGFCIPSSKNTCEHIYDFPPLSEELISEMIRHPYETQSDSFYFVDDRLVMHNKADYSYSGTP

SEQ ID NO: 62 - protein, 433 aa, Homo sapiens
MALRVTRNSKINAENKAKINMAGAKRVPTAPAATSKPGLRPRTALGDIGNKVSEQLQAKMPMKKEAKPSATGKVIDKKLPKPLEKVPMLVPVPVSEPVPEPEPEPEPEPVKEEKLSPEPILVDTASPSPMETSGCAPAEEDLCQAFSDVILAVNDVDAEDGADPNLCSEYVKDIYAYLRQLEEEQAVRPKYLLGREVTGNMRAILIDWLVQVQMKFRLLQETMYMTVSIIDRFMQNNCVPKKMLQLVGVTAMFIASKYEEMYPPEIGDFAFVTDNTYTKHQIRQMEMKILRALNFGLGRPLPLHFLRRASKIGEVDVEQHTLAKYLMELTMLDYDMVHFPPSQIAAGAFCLALKILDNGEWTPTLQHYLSYTEESLLPVMQHLAKNVVMVNQGLTKHMTVKNKYATSKHAKISTLPQLNSALVQDLAKAVAKV

SEQ ID NO: 63 - protein, 210 aa, Homo sapiens
MQAEGQGTGGSTGDADGPGGPGIPDGPGGNAGGPGEAGATGGRGPRGAGAARASGPRGGAPRGPHGGAASAQDGRCPCGARRPDSRLLQLHITMPFSSPMEAELVRRILSRDAAPLPRPGAVLKDFTVSGNLLFMSVRDQDREGAGRMRVVGWGLGSASPEGQKARDLRTPKHKVSEQRPGTPGPPPPEGAQGDGCRGVAFNVMFSAPHI

SEQ ID NO: 64 - protein, 210 aa, Homo sapiens; identical to SEQ ID NO: 63

SEQ ID NO: 65 - protein, 2442 aa, Homo sapiens
MAENLLDGPPNPKRAKLSSPGFSANDSTDFGSLFDLENDLPDELIPNGGELGLLNSGNLVPDAASKHKQLSELLRGGSGSSINPGIGNVSASSPVQQGLGGQAQGQPNSANMASLSAMGKSPLSQGDSSAPSLPKQAASTSGPTPAASQALNPQAQKQVGLATSSPATSQTGPGICMNANFNQTHPGLLNSNSGHSLINQASQGQAQVMNGSLGAAGRGRGAGMPYPTPAMQGASSSVLAETLTQVSPQMTGHAGLNTAQAGGMAKMGITGNTSPFGQPFSQAGGQPMGATGVNPQLASKQSMVNSLPTFPTDIKNTSVTNVPNMSQMQTSVGIVPTQAIATGPTADPEKRKLIQQQLVLLLHAHKCQRREQANGEVRACSLPHCRTMKNVLNHMTHCQAGKACQVAHCASSRQIISHWKNCTRHDCPVCLPLKNASDKRNQQTILGSPASGIQNTIGSVGTGQQNATSLSNPNPIDPSSMQRAYAALGLPYMNQPQTQLQPQVPGQQPAQPQTHQQMRTLNPLGNNPMNIPAGGITTDQQPPNLISESALPTSLGATNPLMNDGSNSGNIGTLSTIPTAAPPSSTGVRKGWHEHVTQDLRSHLVHKLVQAIFPTPDPAALKDRRMENLVAYAKKVEGDMYESANSRDEYYHLLAEKIYKIQKELEEKRRSRLHKQGILGNQPALPAPGAQPPVIPQAQPVRPPNGPLSLPVNRMQVSQGMNSFNPMSLGNVQLPQAPMGPRAASPMNHSVQMNSMGSVPGMAISPSRMPQPPNMMGAHTNNMMAQAPAQSQFLPQNQFPSSSGAMSVGMGQPPAQTGVSQGQVPGAALPNPLNMLGPQASQLPCPPVTQSPLHPTPPPASTAAGMPSLQHTTPPGMTPPQPAAPTQPSTPVSSSGQTPTPTPGSVPSATQTQSTPTVQAAAQAQVTPQPQTPVQPPSVATPQSSQQQPTPVHAQPPGTPLSQAAASIDNRVPTPSSVASAETNSQQPGPDVPVLEMKTETQAEDTEPDPGESKGEPRSEMMEEDLQGASQVKEETDIAEQKSEPMEVDEKKPEVKVEVKEEEESSSNGTASQSTSPSQPRKKIFKPEELRQALMPTLEALYRQDPESLPFRQPVDPQLLGIPDYFDIVKNPMDLSTIKRKLDTGQYQEPWQYVDDVWLMFNNAWLYNRKTSRVYKFCSKLAEVFEQEIDPVMQSLGYCCGRKYEFSPQTLCCYGKQLCTIPRDAAYYSYQNRYHFCEKCFTEIQGENVTLGDDPSQPQTTISKDQFEKKKNDTLDPEPFVDCKECGRKMHQICVLHYDIIWPSGFVCDNCLKKTGRPRKENKFSAKRLQTTRLGNHLEDRVNKFLRRQNHPEAGEVFVRVVASSDKTVEVKPGMKSRFVDSGEMSESFPYRTKALFAFEEIDGVDVCFFGMHVQEYGSDCPPPNTRRVYISYLDSIHFFRPRCLRTAVYHEILIGYLEYVKKLGYVTGHIWACPPSEGDDYIFHCHPPDQKIPKPKRLQEWYKKMLDKAFAERIIHDYKDIFKQATEDRLTSAKELPYFEGDFWPNVLEESIKELEQEEEERKKEESTAASETTEGSQGDSKNAKKKNNKKTNKNKSSISRANKKKPSMPNVSNDLSQKLYATMEKHKEVFFVIHLHAGPVINTLPPIVDPDPLLSCDLMDGRDAFLTLARDKHWEFSSLRRSKWSTLCMLVELHTQGQDRFVYTCNECKHHVETRWHCTVCEDYDLCINCYNTKSHAHKMVKWGLGLDDEGSSQGEPQSKSPQESRRLSIQRCIQSLVHACQCRNANCSLPSCQKMKRVVQHTKGCKRKTNGGCPVCKQLIALCCYHAKHCQENKCPVPFCLNIKHKLRQQQIQHRLQQAQLMRRRMATMNTRNVPQQSLPSPTSAPPGTPTQQPSTPQTPQPPAQPQPSPVSMSPAGFPSVARTQPPTTVSTGKPTSQVPAPPPPAQPPPAAVEAARQIEREAQQQQHLYRVNINNSMPPGRTGMGTPGSQMAPVSLNVPRPNQVSGPVMPSMPPGQWQQAPLPQQQPMPGLPRPVISMQAQAAVAGPRMPSVQPPRSISPSALQDLLRTLKSPSSPQQQQQVLNILKSNPQLMAAFIKQRTAKYVANQPGMQPQPGLQSQPGMQPQPGMHQQPSLQNLNAMQAGVPRPGVPPQQQAMGGLNPQGQALNIMNPGHNPNMASMNPQYREMLRRQLLQQQQQQQQQQQQQQQQQQGSAGMAGGMAGHGQFQQPQGPGGYPPAMQQQQRMQQHLPLQGSSMGQMAAQMGQLGQMGQPGLGADSTPNIQQALQQRILQQQQMKQQIGSPGQPNPMSPQQHMLSGQPQASHLPGQQIATSLSNQVRSPAPVQSPRPQSQPPHSSPSPRIQPQPSPHHVSPQTGSPHPGLAVTMASSIDQGHLGNPEQSAMLPQLNTPSRSALSSELSLVGDTTGDTLEKFVEGL

SEQ ID NO: 66 - protein, 896 aa, Homo sapiens
MTEESEETVLYIEHRYVCSECNQLYGSLEEVLMHQNSHVPQQHFELVGVADPGVTVATDTASGTGLYQTLVQESQYQCLECGQLLMSPSQLLEHQELHLKMMAPQEAVPAEPSPKAPPLSSSTIHYECVDCKALFASQELWLNHRQTHLRATPTKAPAPVVLGSPVVLGPPVGQARVAVEHSYRKAEEGGEGATVPSAAATTTEVVTEVELLLYKCSECSQLFQLPADFLEHQATHFPAPVPESQEPALQQEVQASSPAEVPVSQPDPLPASDHSYELRNGEAIGRDRRGRRARRNNSGEAGGAATQELFCSACDQLFLSPHQLQQHLRSHREGVFKCPLCSRVFPSPSSLDQHLGDHSSESHFLCVDCGLAFGTEALLLAHRRAHTPNPLHSCPCGKTFVNLTKFLYHRRTHGVGGVPLPTTPVPPEEPVIGFPEPAPAETGEPEAPEPPVSEETSAGPAAPGTYRCLLCSREFGKALQLTRHQRFVHRLERRHKCSICGKMFKKKSHVRNHLRTHTGERPFPCPDCSKPFNSPANLARHRLTHTGERPYRCGDCGKAFTQSSTLRQHRLVHAQHFPYRCQECGVRFHRPYRLLMHRYHHTGEYPYKCRECPRSFLLRRLLEVHQLVVHAGRQPHRCPSCGAAFPSSLRLREHRCAAAAAQAPRRFECGTCGKKVGSAARLQAHEAAHAAAGPGEVLAKEPPAPRAPRATRAPVASPAALGSTATASPAAPARRRGLECSECKKLFSTETSLQVHRRIHTGERPYPCPDCGKAFRQSTHLKDHRRLHTGERPFACEVCGKAFAISMRLAEHRRIHTGERPYSCPDCGKSYRSFSNLWKHRKTHQQQHQAAVRQQLAEAEAAVGLAVMETAVEALPLVEAIEIYPLAEAEGVQISG

SEQ ID NO: 67 - protein, 418 aa, Homo sapiens
MGDKGTRVFKKASPNGKLTVYLGKRDFVDHIDLVDPVDGVVLVDPEYLKERRVYVTLTCAFRYGREDLDVLGLTFRKDLFVANVQSFPPAPEDKKPLTRLQERLIKKLGEHAYPFTFEIPPNLPCSVTLQPGPEDTGKACGVDYEVKAFCAENLEEKIHKRNSVRLVIRKVQYAPERPGPQPTAETTRQFLMSDKPLHLEASLDKEIYYHGEPISVNVHVTNNTNKTVKKIKISVRQYADICLFNTAQYKCPVAMEEADDTVAPSSTFCKVYTLTPFLANNREKRGLALDGKLKHEDTNLASSTLLREGANREILGIIVSYKVKVKLVVSRGGLLGDLASSDVAVELPFTLMHPKPKEEPPHREVPENETPVDTNLIELDTNDDDIVFEDFARQRLKGMKDDKEEEEDGTGSPQLNNR

SEQ ID NO: 68 - protein, 155 aa, Homo sapiens
MERIVICLMVIFLGTLVHKSSSQGQDRHMIRMRQLIDIVDQLKNYVNDLVPEFLPAPEDVETNCEWSAFSCFQKAQLKSANTGNNERIINVSIKKLKRKPPSTNAGRRQKHRLTCPSCDSYEKKPPKEFLERFKSLLQKMIHQHLSSRTHGSEDS

SEQ ID NO: 69 - protein, 998 aa, Homo sapiens
MVFQTRYPSWIILCYIWLLRFAHTGEAQAAKEVLLLDSKAQQTELEWISSPPNGWEEISGLDENYTPIRTYQVCQVMEPNQNNWLRTNWISKGNAQRIFVELKFTLRDCNSLPGVLGTCKETFNLYYYETDYDTGRNIRENLYVKIDTIAADESFTQGDLGERKMKLNTEVREIGPLSKKGFYLAFQDVGACIALVSVKVYYKKCWSIIENLAIFPDTVTGSEFSSLVEVRGTCVSSAEEEAENAPRMHCSAEGEWLVPIGKCICKAGYQQKGDTCEPCGRGFYKSSSQDLQCSRCPTHSFSDKEGSSRCECEDGYYRAPSDPPYVACTRPPSAPQNLIFNINQTTVSLEWSPPADNGGRNDVTYRILCKRCSWEQGECVPCGSNIGYMPQQTGLEDNYVTVMDLLAHANYTFEVEAVNGVSDLSRSQRLFAAVSITTGQAAPSQVSGVMKERVLQRSVELSWQEPEHPNGVITEYEIKYYEKDQRERTYSTVKTKSTSASINNLKPGTVYVFQIRAFTAAGYGNYSPRLDVATLEEATGKMFEATAVSSEQNPVIIIAVVAVAGTIILVFMVFGFIIGRRHCGYSKADQEGDEELYFHFKFPGTKTYIDPETYEDPNRAVHQFAKELDASCIKIERVIGAGEFGEVCSGRLKLPGKRDVAVAIKTLKVGYTEKQRRDFLCEASIMGQFDHPNVVHLEGVVTRGKPVMIVIEFMENGALDAFLRKHDGQFTVIQLVGMLRGIAAGMRYLADMGYVHRDLAARNILVNSNLVCKVSDFGLSRVIEDDPEAVYTTTGGKIPVRWTAPEAIQYRKFTSASDVWSYGIVMWEVMSYGERPYWDMSNQDVIKAIEEGYRLPAPMDCPAGLHQLMLDCWQKERAERPKFEQIVGILDKMIRNPNSLKTPLGTCSRPISPLLDQNTPDFTTFCSVGEWLQAIKMERYKDNFTAAGYNSLESVARMTIEDVMSLGITLVGHQKKIMSSIQTMRAQMLHLHGTGIQV

SEQ ID NO: 70 - protein, 923 aa, Homo sapiens
MKVGWPGESCWQVGLAVEDSPALGAPRVGALPDVVPEGTLLNMVLRRMHRPRSCSYQLLLEHQRPSCIQGLRWTPLTNSEESLDFSESLEQASTERVLRAGRQLHRHLLATCPNLIRDRKYHLRLYRQCCSGRELVDGILALGLGVHSRSQVVGICQVLLDEGALCHVKHDWAFQDRDAQFYRFPGPEPEPVRTHEMEEELAEAVALLSQRGPDALLTVALRKPPGQRTDEELDLIFEELLHIKAVAHLSNSVKRELAAVLLFEPHSKAGTVLFSQGDKGTSWYIIWKGSVNVVTHGKGLVTTLHEGDDFGQLALVNDAPRAATIILREDNCHFLRVDKQDFNRIIKDVEAKTMRLEEHGKVVLVLERASQGAGPSRPPTPGRNRYTVMSGTPEKILELLLEAMGPDSSAHDPTETFLSDFLLTHRVFMPSAQLCAALLHHFHVEPAGGSEQERSTYVCNKRQQILRLVSQWVALYGSMLHTDPVATSFLQKLSDLVGRDTRLSNLLREQWPERRRCHRLENGCGNASPQMKARNLPVWLPNQDEPLPGSSCAIQVGDKVPYDICRPDHSVLTLQLPVTASVREVMAALAQEDGWTKGQVLVKVNSAGDAIGLQPDARGVATSLGLNERLFVVNPQEVHELIPHPDQLGPTVGSAEGLDLVSAKDLAGQLTDHDWSLFNSIHQVELIHYVLGPQHLRDVTTANLERFMRRFNELQYWVATELCLCPVPGPRAQLLRKFIKLAAHLKEQKNLNSFFAVMFGLSNSAISRLAHTWERLPHKVRKLYSALERLLDPSWNHRVYRLALAKLSPPVIPFMPLLLKDMTFIHEGNHTLVENLINFEKMRMMARAARMLHHCRSHNPVPLSPLRSRVSHLHEDSQVARISTCSEQSLSTRSPASTWAYVQQLKVIDNQRELSRLSRELEP

SEQ ID NO: 71 - protein, 419 aa, Homo sapiens
MNRHLWKSQLCEMVQPSGGPAADQDVLGEESPLGKPAMLHLPSEQGAPETLQRCLEENQELRDAIRQSNQILRERCEELLHFQASQREEKEFLMCKFQEARKLVERLGLEKLDLKRQKEQALREVEHLKRCQQQMAEDKASVKAQVTSLLGELQESQSRLEAATKECQALEGRARAASEQARQLESEREALQQQHSVQVDQLRMQGQSVEAALRMERQAASEEKRKLAQLQVAYHQLFQEYDNHIKSSVVGSERKRGMQLEDLKQQLQQAEEALVAKQEVIDKLKEEAEQHKIVMETVPVLKAQADIYKADFQAERQAREKLAEKKELLQEQLEQLQREYSKLKASCQESARIEDMRKRHVEVSQAPLPPAPAYLSSPLALPSQRRSPPEEPPDFCCPKCQYQAPDMDTLQIHVMECIE

SEQ ID NO: 72 - protein, 254 aa, Homo sapiens
MAAYKLVLIRHGESAWNLENRFSGWYDADLSPAGHEEAKRGGQALRDAGYEFDICFTSVQKRAIRTLWTVLDAIDQMWLPVVRTWRLNERHYGGLTGLNKAETAAKHGEAQVKIWRRSYDVPPPPMEPDHPFYSNISKDRRYADLTEDQLPSCESLKDTIARALPFWNEEIVPQIKEGKRVLIAAHGNSLRGIVKHLEGLSEEAIMELNLPTGIPIVYELDKNLKPIKPMQFLGDEETVRKAMEAVAAQGKAKK

SEQ ID NO: 73 - protein, 694 aa, Homo sapiens
MQPAIQVWFGEDLPLSPRSPLTPRHGPGLANVCQYDEWIAVRHEATLLPMQEDLSIWLSGLLGIKVKAEKLLEELDNGVLLCQLIDVLQNMVKTCNSEESGNFPMRKVPCKKDAASGSFFARDNTANFLHWCRDIGVDETYLFESEGLVLHKDPRQVYLCLLEIGRIVSRYGVEPPVLVKLEKEIELEETLLNTSGPEDSISIPKSCCRHEELHEAVKHIAEDPPCSCSHRFSIEYLSEGRYRLGDKILFIRMLHGKHVMVRVGGGWDTLQGFLLKYDPCRILQFATLEQKILAFQKGVSNESVPDSPARTPQPPEMNPLSAVNMFQKQNSKPSVPVSIPKSKEKQGRPPGALVPASSLKGGNLGSMSVRSKLPNSPAASSHPKLKSSKGITKKPQAPSNNASSSLASLNPVGKNTSSPALPRTAPCISESPRKCISSPNTPKAKVIPAQNSADLPESTLLPNKCSGKTQPKYLKHNHISSRDNAVSHLAAHSNSSSKCPKLPKANIPVRPKPSFQSSAKMTKTSSKTIATGLGTQSQPSDGAPQAKPVPAQKLKSALNLNQPVSVSSVSPVKATQKSKDKNIVSATKKQPQNKSAFQKTGPSSLKSPGRTPLSIVSLPQSSTKTQTAPKSAQTVAKSQHSTKGPPRSGKTPASIRKPPSSVKDADSGDKKPTAKKKEDDDHYFVMTGSKKPRK

SEQ ID NO: 74 - protein, 406 aa, Homo sapiens
MGKVWKQQMYPQYATYYYPQYLQAKQSLVPAHPMAPPSPSTTSSNNNSSSSSNSGWDQLSKTNLYIRGLPPHTTDQDLVKLCQPYGKIVSTKAILDKTTNKCKGYGFVDFDSPAAAQKAVSALKASGVQAQMAKQQEQDPTNLYISNLPLSMDEQELENMLKPFGQVISTRILRDSSGTSRGVGFARMESTEKCEAVIGHFNGKFIKTPPGVSAPTEPLLCKFADGGQKKRQNPNKYIPNGRPWHREGEVRLAGMTLTYDPTTAAIQNGFYPSPYSIATNRMITQTSITPYIASPVSAYQVQSPSWMQPQPYILQHPGAVLTPSMEHTMSLQPASMISPLAQQMSHLSLGSTGTYMPATSAMQGAYLPQYAHMQTTAVPVEEASGQQQVAVETSNDHSPYTFQPNK

SEQ ID NO: 75 - protein, 115 aa, Homo sapiens
MRYVASYLLAALGGNSSPSAKDIKKILDSVGIEADDDRLNKVISELNGKNIEDVIAQGIGKLASVPAGGAVAVSAAPGSAAPAAGSAPAAAEEKKDEKKEESEESDDDMGFGLFD

SEQ ID NO: 76 - protein, 257 aa, Homo sapiens
MEFPDLGAHCSEPSCQRLDFLPLKCDACSGIFCADHVAYAQHHCGSAYQKDIQVPVCPLCNVPVPVARGEPPDRAVGEHIDRDCRSDPAQQKRKIFTNKCERAGCRQREMMKLTCERCSRNFCIKHRHPLDHDCSGEGHPTSRAGLAAISRAQAVASTSTVPSPSQTMPSCTSPSRATTRSPSWTAPPVIALQNGLSEDEALQRALEMSLAETKPQVPSCQEEEDLALAQALSASEAEYQRQQAQSRSSKPSNCSLC

SEQ ID NO: 77 - protein, 709 aa, Homo sapiens
MAETLEFNDVYQEVKGSMNDGRLRLSRQGIIFKNSKTGKVDNIQAGELTEGIWRRVALGHGLKLLTKNGHVYKYDGFRESEFEKLSDFFKTHYRLELMEKDLCVKGWNWGTVKFGGQLLSFDIGDQPVFEIPLSNVSQCTTGKNEVTLEFHQNDDAEVSLMEVRFYVPPTQEDGVDPVEAFAQNVLSKADVIQATGDAICIFRELQCLTPRGRYDIRIYPTFLHLHGKTFDYKIPYTTVLRLFLLPHKDQRQMFFVISLDPPIKQGQTRYHFLILLFSKDEDISLTLNMNEEEVEKRFEGRLTKNMSGSLYEMVSRVMKALVNRKITVPGNFQGHSGAQCITCSYKASSGLLYPLERGFIYVHKPPVHIRFDEISFVNFARGTTTTRSFDFEIETKQGTQYTFSSIEREEYGKLFDFVNAKKLNIKNRGLKEGMNPSYDEYADSDEDQHDAYLERMKEEGKIREENANDSSDDSGEETDESFNPGEEEEDVAEEFDSNASASSSSNEGDSDRDEKKRKQLKKAKMAKDRKSRKKPVEVKKGKDPNAPKRPMSAYMLWLNASREKIKSDHPGISITDLSKKAGEIWKGMSKEKKEEWDRKAEDARRDYEKAMKEYEGGRGESSKRDKSKKKKKVKVKMEKKSTPSRGSSSKSSSRQLSESFKSKEFVSSDESSSGENKSKKKRRRSEDSEEEELASTPPSSEDSASGSDE

SEQ ID NO: 78 - protein, 479 aa, Homo sapiens
MDFSRNLYDIGEQLDSEDLASLKFLSLDYIPQRKQEPIKDALMLFQRLQEKRMLEESNLSFLKELLFRINRLDLLITYLNTRKEEMERELQTPGRAQISAYRVMLYQISEEVSRSELRSFKFLLQEEISKCKLDDDMNLLDIFIEMEKRVILGEGKLDILKRVCAQINKSLLKIINDYEEFSKERSSSLEGSPDEFSNGEELCGVMTISDSPREQDSESQTLDKVYQMKSKPRGYCLIINNHNFAKAREKVPKLHSIRDRNGTHLDAGALTTTFEELHFEIKPHDDCTVEQIYEILKIYQLMDHSNMDCFICCILSHGDKGIIYGTDGQEAPIYELTSQFTGLKCPSLAGKPKVFFIQACQGDNYQKGIPVETDSEEQPYLEMDLSSPQTRYIPDEADFLLGMATVNNCVSYRNPAEGTWYIQSLCQSLRERCPRGDDILTILTEVNYEVSNKDDKKNMGKQMPQPTFTLRKKLVFPSD

SEQ ID NO: 79 - protein, 521 aa, Homo sapiens
MKSQGQHWYSSSDKNCKVSFREKLLIIDSNLGVQDVENLKFLCIGLVPNKKLEKSSSASDVFEHLLAEDLLSEEDPFFLAELLYIIRQKKLLQHLNCTKEEVERLLPTRQRVSLFRNLLYELSEGIDSENLKDMIFLLKDSLPKTEMTSLSFLAFLEKQGKIDEDNLTCLEDLCKTVVPKLLRNIEKYKREKAIQIVTPPVDKEAESYQGEEELVSQTDVKTFLEALPQESWQNKHAGSNGNRATNGAPSLVSRGMQGASANTLNSETSTKRAAVYRMNRNHRGLCVIVNNHSFTSLKDRQGTHKDAEILSHVFQWLGFTVHIHNNVTKVEMEMVLQKQKCNPAHADGDCFVFCILTHGRFGAVYSSDEALIPIREIMSHFTALQCPRLAEKPKLFFIQACQGEEIQPSVSIEADALNPEQAPTSLQDSIPAEADFLLGLATVPGYVSFRHVEEGSWYIQSLCNHLKKLVPRMLKFLEKTMEIRGRKRTVWGAKQISATSLPTAISAQTPRPPMRRWSSVS

SEQ ID NO: 80 - protein, 3122 aa, Homo sapiens
MPGAAGVLLLLLLSGGLGGVQAQRPQQQRQSQAHQQRGLFPAVLNLASNALITTNATCGEKGPEMYCKLVEHVPGQPVRNPQCRICNQNSSNPNQRHPITNAIDGKNTWWQSPSIKNGIEYHYVTITLDLQQVFQIAYVIVKAANSPRPGNWILERSLDDVEYKPWQYHAVTDTECLTLYNIYPRTGPPSYAKDDEVICTSFYSKIHPLENGEIHISLINGRPSADDPSPELLEFTSARYIRLRFQRIRTLNADLMMFAHKDPREIDPIVTRRYYYSVKDISVGGMCICYGHARACPLDPATNKSRCECEHNTCGDSCDQCCPGFHQKPWRAGTFLTKTECEACNCHGKAEECYYDENVARRNLSLNIRGKYIGGGVCINCTQNTAGINCETCTDGFFRPKGVSPNYPRPCQPCHCDPIGSLNEVCVKDEKHARRGLAPGSCHCKTGFGGVSCDRCARGYTGYPDCKACNCSGLGSKNEDPCFGPCICKENVEGGDCSRCKSGFFNLQEDNWKGCDECFCSGVSNRCQSSYWTYGKIQDMSGWYLTDLPGRIRVAPQQDDLDSPQQISISNAEARQALPHSYYWSAPAPYLGNKLPAVGGQLTFTISYDLEEEEEDTERVLQLMIILEGNDLSISTAQDEVYLHPSEEHTNVLLLKEESFTIHGTHFPVRRKEFMTVLANLKRVLLQITYSFGMDAIFRLSSVNLESAVSYPTDGSIAAAVEVCQCPPGYTGSSCESCWPRHRRVNGTIFGGICEPCQCFGHAESCDDVTGECLNCKDHTGGPYCDKCLPGFYGEPTKGTSEDCQPCACPLNIPSNNFSPTCHLDRSLGLICDGCPVGYTGPRCERCAEGYFGQPSVPGGSCQPCQCNDNLDFSIPGSCDSLSGSCLICKPGTTGRYCELCADGYFGDAVDAKNCQPCRCNAGGSFSEVCHSQTGQCECRANVQGQRCDKCKAGTFGLQSARGCVPCNCNSFGSKSFDCEESGQCWCQPGVTGKKCDRCAHGYFNFQEGGCTACECSHLGNNCDPKTGRCICPPNTIGEKCSKCAPNTWGHSITTGCKACNCSTVGSLDFQCNVNTGQCNCHPKFSGAKCTECSRGHWNYPRCNLCDCFLPGTDATTCDSETKKCSCSDQTGQCTCKVNVEGIHCDRCRPGKFGLDAKNPLGCSSCYCFGTTTQCSEAKGLIRTWVTLKAEQTILPLVDEALQHTTTKGIVFQHPEIVAHMDLMREDLHLEPFYWKLPEQFEGKKLMAYGGKLKYAIYFEAREETGFSTYNPQVIIRGGTPTHARIIVRHMAAPLIGQLTRHEIEMTEKEWKYYGDDPRVHRTVTREDFLDILYDIHYILIKATYGNFMRQSRISEISMEVAEQGRGTTMTPPADLIEKCDCPLGYSGLSCEACLPGFYRLRSQPGGRTPGPTLGTCVPCQCNGHSSLCDPETSICQNCQHHTAGDFCERCALGYYGIVKGLPNDCQQCACPLISSSNNFSPSCVAEGLDDYRCTACPRGYEGQYCERCAPGYTGSPGNPGGSCQECECDPYGSLPVPCDPVTGFCTCRPGATGRKCDGCKHWHAREGWECVFCGDECTGLLLGDLARLEQMVMSINLTGPLPAPYKMLYGLENMTQELKHLLSPQRAPERLIQLAEGNLNTLVTEMNELLTRATKVTADGEQTGQDAERTNTRAKSLGEFIKELARDAEAVNEKAIKLNETLGTRDEAFERNLEGLQKEIDQMIKELRRKNLETQKEIAEDELVAAEALLKKVKKLFGESRGENEEMEKDLREKLADYKNKVDDAWDLLREATDKIREANRLFAVNQKNMTALEKKKEAVESGKRQIENTLKEGNDILDEANRLADEINSIIDYVEDIQTKLPPMSEELNDKIDDLSQEIKDRKLAEKVSQAESHAAQLNDSSAVLDGILDEAKNISFNATAAFKAYSNIKDYIDEAEKVAKEAKDLAHEATKLATGPRGLLKEDAKGCLQKSFRILNEAKKLANDVKENEDHLNGLKTRIENADARNGDLLRTLNDTLGKLSAIPNDTAAKLQAVKDKARQANDTAKDVLAQITELHQNLDGLKKNYNKLADSVAKTNAVVKDPSKNKIIADADATVKNLEQEADRLIDKLKPIKELEDNLKKNISEIKELINQARKQANSIKVSVSSGGDCIRTYKPEIKKGSYNNIVVNVKTAVADNLLFYLGSAKFIDFLAIEMRKGKVSFLWDVGSGVGRVEYPDLTIDDSYWYRIVASRTGRNGTISVRALDGPKASIVPSTHHSTSPPGYTILDVDANAMLFVGGLTGKLKKADAVRVITFTGCMGETYFDNKPIGLWNFREKEGDCKGCTVSPQVEDSEGTIQFDGEGYALVSRPIRWYPNISTVMFKFRTFSSSALLMYLATRDLRDFMSVELTDGHIKVSYDLGSGMASVVSNQNHNDGKWKSFTLSRIQKQANISIVDIDTNQEENIATSSSGNNFGLDLKADDKIYFGGLPTLRNLSMKARPEVNLKKYSGCLKDIEISRTPYNILSSPDYVGVTKGCSLENVYTVSFPKPGFVELSPVPIDVGTEINLSFSTKNESGIILLGSGGTPAPPRRKRRQTGQAYYAILLNRGRLEVHLSTGARTMRKIVIRPEPNLFHDGREHSVHVERTRGIFTVQVDENRRYMQNLTVEQPIEVKKLFVGGAPPEFQPSPLRNIPPFEGCIWNLVINSVPMDFARPVSFKNADIGRCAHQKLREDEDGAAPAEIVIQPEPVPTPAFPTPTPVLTHGPCAAESEPALLIGSKQFGLSRNSHIAIAFDDTKVKNRLTIELEVRTEAESGLLFYMARINHADFATVQLRNGLPYFSYDLGSGDTHTMIPTKINDGQWHKIKIMRSKQEGILYVDGASNRTISPKKADILDVVGMLYVGGLPINYTTRRIGPVTYSIDGCVRNLHMAEAPADLEQPTSSFHVGTCFANAQRGTYFDGTGFAKAVGGFKVGLDLLVEFEFRTTTTTGVLLGISSQKMDGMGIEMIDEKLMFHVDNGAGRFTAVYDAGVPGHLCDGQWHKVTANKIKHRIELTVDGNQVEAQSPNPASTSADTNDPVFVGGFPDDLKQFGLTTSIPFRGCIRSLKLTKGTGKPLEVNFAKALELRGVQPVSCPAN

SEQ ID NO: 81 - protein, 488 aa, Homo sapiens
MSYPGYPPTGYPPFPGYPPAGQESSFPPSGQYPYPSGFPPMGGGAYPQVPSSGYPGAGGYPAPGGYPAPGGYPGAPQPGGAPSYPGVPPGQGFGVPPGGAGFSGYPQPPSQSYGGGPAQVPLPGGFPGGQMPSQYPGGQPTYPSQINTDSFSSYPVFSPVSLDYSSEPATVTQVTQGTIRPAANFDAIRDAEILRKAMKGFGTDEQAIVDVVANRSNDQRQKIKAAFKTSYGKDLIKDLKSELSGNMEELILALFMPPTYYDAWSLRKAMQGAGTQERVLIEILCTRTNQEIREIVRCYQSEFGRDLEKDIRSDTSGHFERLLVSMCQGNRDENQSINHQMAQEDAQRLYQAGEGRLGTDESCFNMILATRSFPQLRATMEAYSRMANRDLLSSVSREFSGYVESGLKTILQCALNRPAFFAERLYYAMKGAGTDDSTLVRIVVTRSEIDLVQIKQMFAQMYQKTLGTMIAGDTSGDYRRLLLAIVGQ

SEQ ID NO: 82 - protein, 943 aa, homo sapiens
MAASGLDHLKNGYRRRFCRPSRARDINTEQGQNVLEILQDCFEEKSLANDFSTNSTKSVPNSTRKIKDTCIQSPSKECQKSHPKSVPVSSKKKEASLQFVVEPSEATNRSVQAHEVHQKILATDVSSKNTPDSKKISSRNINDHHSEADEEFYLSVGSPSVLLDAKTSVSQNVIPSSAQKRETYTFENSVNMLPSSTEVSVKTKKRLNFDDKVMLKKIEIDNKVSDEEDKTSEGQERKPSGSSQNRIRDSEYEIQRQAKKSFSTLFLETVKRKSESSPIVRHAATAPPHSCPPDDTKLIEDEFIIDESDQSFASRSWITIPRKAGSLKQRTISPAESTALLQGRKSREKHHNILPKTLANDKHSHKPHPVETSQPSDKTVLDTSYALIGETVNNYRSTKYEMYSKNAEKPSRSKRTIKQKQRRKFMAKPAEEQLDVGQSKDENIHTSHITQDEFQRNSDRNMEEHEEMGNDCVSKKQMPPVGSKKSSTRKDKEESKKKRFSSESKNKLVPEEVTSTVTKSRRISRRPSDWWVVKSEESPVYSNSSVRNELPMHHNSSRKSTKKTNQSSKNIRKKTIPLKRQKTATKGNQRVQKFLNAEGSGGIVGHDEISRCSLSEPLESDEADLAKKKNLDCSRSTRSSKNEDNIMTAQNVPLKPQTSGYTCNIPTESNLDSGEHKTSVLEESGPSRLNNNYLMSGKNDVDDEEVHGSSDDSKQSKVIPKNRIHHKLVLPSNTPNVRRTKRTRLKPLEYWRGERIDYQGRPSGGFVISGVLSPDTISSKRKAKENIGKVNKKSNKKRICLDNDERKTNLMVNLGIPLGDPLQPTRVKDPETREIILMDLVRPQDTYQFFVKHGELKVYKTLDTPFFSTGKLILGPQEEKGKQHVGQDILVFYVNFGDLLCTLHETPYILSTGDSFYVPSGNYYNIKNLRNEESVLLFTQIKR

SEQ ID NO: 83 - protein, 724 aa, Homo sapiens
MSFPKAPLKRFNDPSGCAPSPGAYDVKTLEVLKGPVSFQKSQRFKQQKESKQNLNVDKDTTLPASARKVKSSESKESQKNDKDLKILEKEIRVLLQERGAQDRRIQDLETELEKMEARLNAALREKTSLSANNATLEKQLIELTRTNELLKSKFSENGNQKNLRILSLELMKLRNKRETKMRGMMAKQEGMEMKLQVTQRSLEESQGKIAQLEGKLVSIEKEKIDEKSETEKLLEYIEEISCASDQVEKYKLDIAQLEENLKEKNDEILSLKQSLEENIVILSKQVEDLNVKCQLLEKEKEDHVNRNREHNENLNAEMQNLKQKFILEQQEREKLQQKELQIDSLLQQEKELSSSLHQKLCSFQEEMVKEKNLFEEELKQTLDELDKLQQKEEQAERLVKQLEEEAKSRAEELKLLEEKLKGKEAELEKSSAAHTQATLLLQEKYDSMVQSLEDVTAQFESYKALTASEIEDLKLENSSLQEKAAKAGKNAEDVQHQILATESSNQEYVRMLLDLQTKSALKETEIKEITVSFLQKITDLQNQLKQQEEDFRKQLEDEEGRKAEKENTTAELTEEINKWRLLYEELYNKTKPFQLQLDAFEVEKQALLNEHGAAQEQLNKIRDSYAKLLGHQNLKQKIKHVVKLKDENSQLKSEVSKLRCQLAKKKQSETKLQEELNKVLGIKHFDPSKAFHHESKENFALKTPLKEGNTNCYRAPMECQESWK

SEQ ID NO: 84 - protein, 818 aa, Homo sapiens
MESLSPGGPPGHPYQGEASTCWQLTVRVLEARNLRWADLLSEADPYVILQLSTAPGMKFKTKTLTDTSHPVWNEAFRFLIQSQVKNVLELSIYDEDSVTEDDICFKVLYDISEVLPGKLLRKTFSQSPQGEEELDVEFLMEETSDRPENLITNKVIVARELSCLDVHLDSTGSTAVVADQDKLELELVLKGSYEDTQTSFLGTASAFRFHYMAALETELSGRLRSSRSNGWNGDNSAGYLTVPLRPLTIGKEVTMDVPAPNAPGVRLQLKAEGCPEELAVHLGFNLCAEEQAFLSRRKQVVAKALKQALQLDRDLQEDEVPVVGIMATGGGARAMTSLYGHLLALQKLGLLDCVTYFSGISGSTWTMAHLYGDPEWSQRDLEGPIRYAREHLAKSKLEVFSPERLASYRRELELRAEQGHPTTFVDLWALVLESMLHGQVMDQKLSGQRAALERGQNPLPLYLSLNVKENNLETLDFKEWVEFSPYEVGFLKYGAFVPPELFGSEFFMGRLMRRIPEPRICFLEAIWSNIFSLNLLDAWYDLTSSGESWKQHIKDKTRSLEKEPLTTSGTSSRLEASWLQPGTALAQAFKGFLTGRPLHQRSPNFLQGLQLHQDYCSHKDFSTWADYQLDSMPSQLTPKEPRLCLVDAAYFINTSSPSMFRPGRRLDLILSFDYSLSAPFEALQQTELYCRARGLPFPRVEPSPQDQHQPRECHLFSDPACPEAPILLHFPLVNASFKDHSAPGVQRSPAELQGGQVDLTGATCPYTLSNMTYKEEDFERLLRLSDYNVQTSQGAILQALRTALKHRTLEARPPRAQT

SEQ ID NO: 85 - protein, 181 aa, Homo sapiens
MCKGLAALPHSCLERAKEIKIKLGILLQKPDSVGDLVIPYNEKPEKPAKTQKTSLDEALQWRDSLDKLLQNNYGLASFKSFLKSEFSEENLEFWIACEDYKKIKSPAKMAEKAKQIYEEFIQTEAPKEVNIDHFTKDITMKNLVEPSLSSFDMAQKRIHALMEKDSLPRFVRSEFYQELIK

SEQ ID NO: 86 - protein, 202 aa, Homo sapiens
MSGRSVRAETRSRAKDDIKKVMAAIEKVRKWEKKWVTVGDTSLRIFKWVPVTDSKEKEKSKSNSSAAREPNGFPSDASANSSLLLEFQDENSNQSSVSDVYQLKVDSSTNSSPSPQQSESLSPAHTSDFRTDDSQPPTLGQEILEEPSLPSSEVADEPPTLTKEEPVPLETQVVEEEEDSGAPPLKRFCVDQPTVPQTASES

SEQ ID NO: 87 - protein, 158 aa, Homo sapiens
MEKALKIDTPQQGSIQDINHRVWVLQDQTLIAVPRKDRMSPVTIALISCRHVETLEKDRGNPIYLGLNGLNLCLMCAKVGDQPTLQLKEKDIMDLYNQPEPVKSFLFYHSQSGRNSTFESVAFPGWFIAVSSEGGCPLILTQELGKANTTDFGLTMLF

SEQ ID NO: 88 - protein, 184 aa, Homo sapiens
MREYKLVVLGSGGVGKSALTVQFVQGIFVEKYDPTIEDSYRKQVEVDCQQCMLEILDTAGTEQFTAMRDLYMKNGQGFALVYSITAQSTFNDLQDLREQILRVKDTEDVPMILVGNKCDLEDERVVGKEQGQNLARQWCNCAFLESSAKSKINVNEIFYDLVRQINRKTPVEKKKPKKKSCLLL

SEQ ID NO: 89 - protein, 495 aa, Homo sapiens
MSMLVVFLLLWGVTWGPVTEAAIFYETQPSLWAESESLLKPLANVTLTCQAHLETPDFQLFKNGVAQEPVHLDSPAIKHQFLLTGDTQGRYRCRSGLSTGWTQLSKLLELTGPKSLPAPWLSMAPVSWITPGLKTTAVCRGVLRGVTFLLRREGDHEFLEVPEAQEDVEATFPVHQPGNYSCSYRTDGEGALSEPSATVTIEELAAPPPPVLMHHGESSQVLHPGNKVTLTCVAPLSGVDFQLRRGEKELLVPRSSTSPDRIFFHLNAVALGDGGHYTCRYRLHDNQNGWSGDSAPVELILSDETLPAPEFSPEPESGRALRLRCLAPLEGARFALVREDRGGRRVHRFQSPAGTEALFELHNISVADSANYSCVYVDLKPPFGGSAPSERLELHVDGPPPRPQLRATWSGAVLAGRDAVLRCEGPIPDVTFELLREGETKAVKTVRTPGAAANLELIFVGPQHAGNYRCRYRSWVPHTFESELSDPVELLVAES

SEQ ID NO: 90 - protein, 2647 aa, Homo sapiens
MSSSHSRAGQSAAGAAPGGGVDTRDAEMPATEKDLAEDAPWKKIQQNTFTRWCNEHLKCVSKRIANLQTDLSDGLRLIALLEVLSQKKMHRKHNQRPTFRQMQLENVSVALEFLDRESIKLVSIDSKAIVDGNLKLILGLIWTLILHYSISMPMWDEEEDEEAKKQTPKQRLLGWIQNKLPQLPITNFSRDWQSGRALGALVDSCAPGLCPDWDSWDASKPVTNAREAMQQADDWLGIPQVITPEEIVDPNVDEHSVMTYLSQFPKAKLKPGAPLRPKLNPKKARAYGPGIEPTGNMVKKRAEFTVETRSAGQGEVLVYVEDPAGHQEEAKVTANNDKNRTFSVWYVPEVTGTHKVTVLFAGQHIAKSPFEVYVDKSQGDASKVTAQGPGLEPSGNIANKTTYFEIFTAGAGTGEVEVVIQDPMGQKGTVEPQLEARGDSTYRCSYQPTMEGVHTVHVTFAGVPIPRSPYTVTVGQACNPSACRAVGRGLQPKGVRVKETADFKVYTKGAGSGELKVTVKGPKGEERVKQKDLGDGVYGFEYYPMVPGTYIVTITWGGQNIGRSPFEVKVGTECGNQKVRAWGPGLEGGVVGKSADFVVEAIGDDVGTLGFSVEGPSQAKIECDDKGDGSCDVRYWPQEAGEYAVHVLCNSEDIRLSPFMADIRDAPQDFHPDRVKARGPGLEKTGVAVNKPAEFTVDAKHGGKAPLRVQVQDNEGCPVEALVKDNGNGTYSCSYVPRKPVKHTAMVSWGGVSIPNSPFRVNVGAGSHPNKVKVYGPGVAKTGLKAHEPTYFTVDCAEAGQGDVSIGIKCAPGVVGPAEADIDFDIIRNDNDTFTVKYTPRGAGSYTIMVLFADQATPTSPIRVKVEPSHDASKVKAEGPGLSRTGVELGKPTHFTVNAKAAGKGKLDVQFSGLTKGDAVRDVDIIDHHDNTYTVKYTPVQQGPVGVNVTYGGDPIPKSPFSVAVSPSLDLSKIKVSGLGEKVDVGKDQEFTVKSKGAGGQGKVASKIVGPSGAAVPCKVEPGLGADNSVVRFLPREEGPYEVEVTYDGVPVPGSPFPLEAVAPTKPSKVKAFGPGLQGGSAGSPARFTIDTKGAGTGGLGLTVEGPCEAQLECLDNGDGTCSVSYVPTEPGDYNINILFADTHIPGSPFKAHVVPCFDASKVKCSGPGLERATAGEVGQFQVDCSSAGSAELTIEICSEAGLPAEVYIQDHGDGTHTITYIPLCPGAYTVTIKYGGQPVPNFPSKLQVEPAVDTSGVQCYGPGIEGQGVFREATTEFSVDARALTQTGGPHVKARVANPSGNLTETYVQDRGDGMYKVEYTPYEEGLHSVDVTYDGSPVPSSPFQVPVTEGCDPSRVRVHGPGIQSGTTNKPNKFTVETRGAGTGGLGLAVEGPSEAKMSCMDNKDGSCSVEYIPYEAGTYSLNVTYGGHQVPGSPFKVPVHDVTDASKVKCSGPGLSPGMVRANLPQSFQVDTSKAGVAPLQVKVQGPKGLVEPVDVVDNADGTQTVNYVPSREGPYSISVLYGDEEVPRSPFKVKVLPTHDASKVKASGPGLNTTGVPASLPVEFTIDAKDAGEGLLAVQITDPEGKPKKTHIQDNHDGTYTVAYVPDVTGRYTILIKYGGDEIPFSPYRVRAVPTGDASKCTVTVSIGGHGLGAGIGPTIQIGEETVITVDTKAAGKGKVTCTVCTPDGSEVDVDVVENEDGTFDIFYTAPQPGKYVICVRFGGEHVPNSPFQVTALAGDQPSVQPPLRSQQLAPQYTYAQGGQQTWAPERPLVGVNGLDVTSLRPFDLVIPFTIKKGEITGEVRMPSGKVAQPTITDNKDGTVTVRYAPSEAGLHEMDIRYDNMHIPGSPLQFYVDYVNCGHVTAYGPGLTHGVVNKPATFTVNTKDAGEGGLSLAIEGPSKAEISCTDNQDGTCSVSYLPVLPGDYSILVKYNEQHVPGSPFTARVTGDDSMRMSHLKVGSAADIPINISETDLSLLTATVVPPSGREEPCLLKRLRNGHVGISFVPKETGEHLVHVKKNGQHVASSPIPVVISQSEIGDASRVRVSGQGLHEGHTFEPAEFIIDTRDAGYGGLSLSIEGPSKVDINTEDLEDGTCRVTYCPTEPGNYIINIKFADQHVPGSPFSVKVTGEGRVKESITRRRRAPSVANVGSHCDLSLKIPEISIQDMTAQVTSPSGKTHEAEIVEGENHTYCIRFVPAEMGTHTVSVKYKGQHVPGSPFQFTVGPLGEGGAHKVRAGGPGLERAEAGVPAEFSIWTREAGAGGLAIAVEGPSKAEISFEDRKDGSCGVAYVVQEPGDYEVSVKFNEEHIPDSPFVVPVASPSGDARRLTVSSLQESGLKVNQPASFAVSLNGAKGAIDAKVHSPSGALEECYVTEIDQDKYAVRFIPRENGVYLIDVKFNGTHIPGSPFKIRVGEPGHGGDPGLVSAYGAGLEGGVTGNPAEFVVNTSNAGAGALSVTIDGPSKVKMDCQECPEGYRVTYTPMAPGSYLISIKYGGPYHIGGSPFKAKVTGPRLVSNHSLHETSSVFVDSLTKATCAPQHGAPGPGPADASKVVAKGLGLSKAYVGQKSSFTVDCSKAGNNMLLVGVHGPRTPCEEILVKHVGSRLYSVSYLLKDKGEYTLVVKWGDEHIPGSPYRVVVP

SEQ ID NO: 91 - protein, 583 aa, Homo sapiens
MDLLPPKPKYNPLRNESLSSLEEGASGSTPPEELPSPSASSLGPILPPLPGDDSPTTLCSFFPRMSNLRLANPAGGRPGSKGEPGRAADDGEGIVGAAMPDSGPLPLLQDMNKLSGGGGRRTRVEGGQLGGEEWTRHGSFVNKPTRGWLHPNDKVMGPGVSYLVRYMGCVEVLQSMRALDFNTRTQVTREAISLVCEAVPGAKGATRRRKPCSRPLSSILGRSNLKFAGMPITLTVSTSSLNLMAADCKQIIANHHMQSISFASGGDPDTAEYVAYVAKDPVNQRACHILECPEGLAQDVISTIGQAFELRFKQYLRNPPKLVTPHDRMAGFDGSAWDEEEEEPPDHQYYNDFPGKEPPLGGVVDMRLREGAAPGAARPTAPNAQTPSHLGATLPVGQPVGGDPEVRKQMPPPPPCPGRELFDDPSYVNVQNLDKARQAVGGAGPPNPAINGSAPRDLFDMKPFEDALRVPPPPQSVSMAEQLRGEPWFHGKLSRREAEALLQLNGDFLVRESTTTPGQYVLTGLQSGQPKHLLLVDPEGVVRTKDHRFESVSHLISYHMDNHLPIISAGSELCLQQPVERKL

SEQ ID NO: 92 - protein, 406 aa, Homo sapiens
MALDGPEQMELEEGKAGSGLRQYYLSKIEELQLIVNDKSQNLRRLQAQRNELNAKVRLLREELQLLQEQGSYVGEVVRAMDKKKVLVKVHPEGKFVVDVDKNIDINDVTPNCRVALRNDSYTLHKILPNKVDPLVSLMMVEKVPDSTYEMIGGLDKQIKEIKEVIELPVKHPELFEALGIAQPKGVLLYGPPGTGKTLLARAVAHHTDCTFIRVSGSELVQKFIGEGARMVRELFVMAREHAPSIIFMDEIDSIGSSRLEGGSGGDSEVQRTMLELLNQLDGFEATKNIKVIMATNRIDILDSALLRPGRIDRKIEFPPPNEEARLDILKIHSRKMNLTRGINLRKIAELMPGASGAEVKGVCTEAGMYALRERRVHVTQEDFEMAVAKVMQKDSEKNMSIKKLWK

SEQ ID NO: 93 - protein, 458 aa, Homo sapiens
MSTEGGFGGTSSSDAQQSLQSFWPRVMEEIRNLTVKDFRVQELPLARIKKIMKLDEDVKMISAEAPVLFAKAAQIFITELTLRAWIHTEDNKRRTLQRNDIAMAITKFDQFDFLIDIVPRDELKPPKRQEEVRQSVTPAEPVQYYFTLAQQPTAVQVQGQQQGQQTTSSTTTIQPGQIIIAQPQQGQTTPVTMQVGEGQQVQIVQAQPQGQAQQAQSGTGQTMQVMQQIITNTGEIQQIPVQLNAGQLQYIRLAQPVSGTQVVQGQIQTLATNAQQGQRNASQGKPRRCLKETLQITQTEVQQGQQQFSQFTDGQRNSVQQARVSELTGEAEPREVKATGNSTPCTSSLPTTHPPSHRAGASCVCCSQPQQSSTSPPPSDALQWVVVEVSGTPNQLETHRELHAPLPGMTSLSPLHPSQQLYQIQQVTMPAGQDLAQPMFIQSANQPSDGQAPQVTGD

SEQ ID NO: 94 - protein, 916 aa, Homo sapiens
MVQKESQATLEERESELSSNPAASAGASLEPPAAPAPGEDNPAGAGGAAVAGAAGGARRFLCGVVEGFYGRPWVMEQRKELFRRLQKWELNTYLYAPKDDYKHRMFWREMYSVEEAEQLMTLISAAREYEIEFIYAISPGLDITFSNPKEVSTLKRKLDQVSQFGCRSFALLFDDIDHNMCAADKEVFSSFAHAQVSITNEIYQYLGEPETFLFCPTEYCGTFCYPNVSQSPYLRTVGEKLLPGIEVLWTGPKVVSKEIPVESIEEVSKIIKRAPVIWDNIHANDYDQKRLFLGPYKGRSTELIPRLKGVLTNPNCEFEANYVAIHTLATWYKSNMNGVRKDVVMTDSEDSTVSIQIKLENEGSDEDIETDVLYSPQMALKLALTEWLQEFGVPHQYSSRQVAHSGAKASVVDGTPLVAAPSLNATTVVTTVYQEPIMSQGAALSGEPTTLTKEEEKKQPDEEPMDMVVEKQEETDHKNDNQILSEIVEAKMAEELKPMDTDKESIAESKSPEMSMQEDCISDIAPMQTDEQTNKEQFVPGPNEKPLYTAEPVTLEDLQLLADLFYLPYEHGPKGAQMLREFQWLRANSSVVSVNCKGKDSEKIEEWRSRAAKFEEMCGLVMGMFTRLSNCANRTILYDMYSYVWDIKSIMSMVKSFVQWLGCRSHSSAQFLIGDQEPWAFRGGLAGEFQRLLPIDGANDLFFQPPPLTPTSKVYTIRPYFPKDEASVYKICREMYDDGVGLPFQSQPDLIGDKLVGGLLSLSLDYCFVLEDEDGICGYALGTVDVTPFIKKCKISWIPFMQEKYTKPNGDKELSEAEKIMLSFHEEQEVLPETFLANFPSLIKMDIHKKVTDPSVAKSMMACLLSSLKANGSRGAFCEVRPDDKRILEFYSKLGCFEIAKMEGFPKDVVILGRSL

SEQ ID NO: 95 - protein, 238 aa, Homo sapiens
MSEDLAKQLASYKAQLQQVEAALSGNGENEDLLKLKKDLQEVIELTKDLLSTQPSETLASSDSFASTQPTHSWKVGDKCMAVWSEDGQCYEAEIEEIDEENGTAAITFAGYGNAEVTPLLNLKPVEEGRKAKEDSGNKPMSKKEMIAQQREYKKKKALKKAQRIKELEQEREDQKVKWQQFNNRAYSKNKKGQVKRSIFASPESVTGKVGVGTCGIADKPMTQYQDTSKYNVRHLMPQ

SEQ ID NO: 96 - protein, 479 aa, Homo sapiens
MSDVTIVKEGWVQKRGEYIKNWRPRYFLLKTDGSFIGYKEKPQDVDLPYPLNNFSVAKCQLMKTERPKPNTFIIRCLQWTTVIERTFHVDTPEEREEWTEAIQAVADRLQRQEEERMNCSPTSQIDNIGEEEMDASTTHHKRKTMNDFDYLKLLGKGTFGKVILVREKASGKYYAMKILKKEVIIAKDEVAHTLTESRVLKNTRHPFLTSLKYSFQTKDRLCFVMEYVNGGELFFHLSRERVFSEDRTRFYGAEIVSALDYLHSGKIVYRDLKLENLMLDKDGHIKITDFGLCKEGITDAATMKTFCGTPEYLAPEVLEDNDYGRAVDWWGLGVVMYEMMCGRLPFYNQDHEKLFELILMEDIKFPRTLSSDAKSLLSGLLIKDPNKRLGGGPDDAKEIMRHSFFSGVNWQDVYDKKLVPPFKPQVTSETDTRYFDEEFTAQTITITPPEKYDEDGMDCMDNERRPHFPQFSYSASGRE

SEQ ID NO: 97 - protein, 657 aa, Homo sapiens
MRRAVCFPALCLLLNLHAAGCFSGNNDHFLAINQKKSGKPVFIYKHSQDIEKSLDIAPQKIYRHSYHSSSEAQVSKRHQIVNSAFPRPAYDPSLNLLAMDGQDLEVENLPIPAANVIVVTLQMDVNKLNITLLRIFRQGVAAALGLLPQQVHINRLIGKKNSIELFVSPINRKTGISDALPSEEVLRSLNINVLHQSLSQFGITEVSPEKNVLQGQHEADKIWSKEGFYAVVIFLSIFVIIVTCLMILYRLKERFQLSLRQDKEKNQEIHLSPITLQPALSEAKTVHSMVQPEQAPKVLNVVVDPQGRGAPEIKATTATSVCPSPFKMKPIGLQERRGSNVSLTLDMSSLGNIEPFVSIPTPREKVAMEYLQSASRILTRSQLRDVVASSHLLQSEFMEIPMNFVDPKEIDIPRHGTKNRYKTILPNPLSRVCLRPKNVTDSLSTYINANYIRGYSGKEKAFIATQGPMINTVDDFWQMVWQEDSPVIVMITKLKEKNEKCVLYWPEKRGIYGKVEVLVISVNECDNYTIRNLVLKQGSHTQHVKHYWYTSWPDHKTPDSAQPLLQLMLDVEEDRLASQGRGPVVVHCSAGIGRTGCFIATSIGCQQLKEEGVVDALSIVCQLRMDRGGMVQTSEQYEFVHHALCLYESRLSAETVQ

SEQ ID NO: 98 - protein, 595 aa, Homo sapiens [sequence omitted]

SEQ ID NO: 99 - protein, 1378 aa, Homo sapiens
MSLERELRQLSKAKAKAQRAGQRREEAALCHQLGELLAGHGRYAEALEQHWQELQLRERADDPLGCAVAHRKIGERLAEMEDYPAALQHQHQYLELAHSLRNHTELQRAWATIGRTHLDIYDHCQSRDALLQAQAAFEKSLAIVDEELEGTLAQGELNEMRTRLYLNLGLTFESLQQTALCNDYFRKSIFLAEQNHLYEDLFRARYNLGTIHWRAGQHSQAMRCLEGARECAHTMRKRFMESECCVVIAQVLQDLGDFLAAKRALKKAYRLGSQKPVQRAAICQNLQHVLAVVRLQQQLEEAEGRDPQGAMVICEQLGDLFSKAGDFPRAAEAYQKQLRFAELLDRPGAERAIIHVSLATTLGDMKDHHGAVRHYEEELRLRSGNVLEEAKTWLNIALSREEAGDAYELLAPCFQKALSCAQQAQRPQLQRQVLQHLHTVQLRLQPQEAPETETRLRELSVAEDEDEEEEAEEAAATAESEALEAGEVELSEGEDDTDGLTPQLEEDEELQGHLGRRKGSKWNRRNDMGETLLHRACIEGQLRRVQDLVRQGHPLNPRDYCGWTPLHEACNYGHLEIVRFLLDHGAAVDDPGGQGCEGITPLHDALNCGHFEVAELLLERGASVTLRTRKGLSPLETLQQWVKLYRRDLDLETRQKARAMEMLLQAAASGQDPHSSQAFHTPSSLLFDPETSPPLSPCPEPPSNSTRLPEASQAHVRVSPGQAAPAMARPRRSRHGPASSSSSSEGEDSAGPARPSQKRPRCSATAQRVAAWTPGPASNREAATASTSRAAYQAAIRGVGSAQSRLGPGPPRGHSKALAPQAALIPEEECLAGDWLELDMPLTRSRRPRPRGTGDNRRPSSTSGSDSEESRPRARAKQVRLTCMQSCSAPVNAGPSSLASEPPGSPSTPRVSEPSGDSSAAGQPLGPAPPPPIRVRVQVQDHLFLIPVPHSSDTHSVAWLAEQAAQRYYQTCGLLPRLTLRKEGALLAPQDLIPDVLQSNDEVLAEVTSWDLPPLTDRYRRACQSLGQGEHQQVLQAVELQGLGLSFSACSLALDQAQLTPLLRALKLHTALRELRLAGNRLGDKCVAELVAALGTMPSLALLDLSSNHLGPEGLRQLAMGLPGQATLQSLEELDLSMNPLGDGCGQSLASLLHACPLLSTLRLQACGFGPSFFLSHQTALGSAFQDAEHLKTLSLSYNALGAPALARTLQSLPAGTLLHLELSSVAAGKGDSDLMEPVFRYLAKEGCALAHLTLSANHLGDKAVRDLCRCLSLCPSLISLDLSANPEISCASLEELLSTLQKRPQGLSFLGLSGCAVQGPLGLGLWDKIAAQLRELQLCSRRLCAEDRDALRQLQPSRPGPGECTLDHGSKLFFRRL

SEQ ID NO: 100 - protein, 188 aa, Homo sapiens
MNGDDAFARRPTVGAQIPEKIQKAFDDIAKYFSKEEWEKMKASEKIFYVYMKRKYEAMTKLGFKATLPPFMCNKRAEDFQGNDLDNDPNRGNQVERPQMTFGRLQGISPKIMPKKPAEEGNDSEEVPEASGPQNDGKELCPPGKPTTSEKIHERSGPKRGEHAWTHRLRERKQLVIYEEISDPEEDDE

SEQ ID NO: 101 - protein, 107 aa, Homo sapiens
MARATLSAAPSNPRLLRVALLLLLLVAASRRAAGAPLATELRCQCLQTLQGIHLKNIQSVKVKSPGPHCAQTEVIATLKNGQKACLNPASPMVKKIIEKMLKNGKSN

SEQ ID NO: 102 - protein, 1096 aa, Homo sapiens
MATQVEPLLPGGATLLQAEEHGGLVRKKPPPAPEGKGEPGPNDVRGGEPDGSARRPRPPCAKPHKEGTGQQERESPRPLQLPGAEGPAISDGEEGGGEPGAGGGAAGAAGAGRRDFVEAPPPKVNPWTKNALPPVLTTVNGQSPPEHSAPAKVVRAAVPKQRKGSKVGDFGDAINWPTPGEIAHKSVQPQSHKPQPTRKLPPKKDMKEQEKGEGSDSKESPKTKSDESGEEKNGDEDCQRGGQKKKGNKHKWVPLQIDMKPEVPREKLASRPTRPPEPRHIPANRGEIKGSESATYVPVAPPTPAWQPEIKPEPAWHDQDETSSVKSDGAGGARASFRGRGRGRGRGRGRGRGGTRTHFDYQFGYRKFDGVEGPRTPKYMNNITYYFDNVSSTELYSVDQELLKDYIKRQIEYYFSVDNLERDFFLRRKMDADGFLPITLIASFHRVQALTTDISLIFAALKDSKVVEIVDEKVRRREEPEKWPLPPIVDYSQTDFSQLLNCPEFVPRQHYQKETESAPGSPRAVTPVPTKTEEVSNLKTLPKGLSASLPDLDSENWIEVKKRPRPSPARPKKSEESRFSHLTSLPQQLPSQQLMSKDQDEQEELDFLFDEEMEQMDGRKNTFTAWSDEESDYEIDDRDVNKILIVTQTPHYMRRHPGGDRTGNHTSRAKMSAELAKVINDGLFYYEQDLWAEKFEPEYSQIKQEVENFKKVNMISREQFDTLTPEPPVDPNQEVPPGPPRFQQVPTDALANKLFGAPEPSTIARSLPTTVPESPNYRNTRTPRTPRTPQLKDSSQTSRFYPVVKEGRTLDAKMPRKRKTRHSSNPPLESHVGWVMDSREHRPRTASISSSPSEGTPTVGSYGCTPQSLPKFQHPSHELLKENGFTQHVYHKYRRRCLNERKRLGIGQSQEMNTLFRFWSFFLRDHFNKKMYEEFKQLALEDAKEGYRYGLECLFRYYSYGLEKKFRLDIFKDFQEETVKDYEAGQLYGLEKFWAFLKYSKAKNLDIDPKLQEYLGKFRRLEDFRVDPPMGEEGNHKRHSVVAGGGGGEGRKRCPSQSSSRPAAMISQPPTPPTGQPVREDAKWTSQHSNTQTLGK

SEQ ID NO: 103 - protein, 107 aa, Homo sapiens
MAHATLSAAPSNPRLLRVALLLLLLVAASRRAAGASVVTELRCQCLQTLQGIHLKNIQSVNVRSPGPHCAQTEVIATLKNGKKACLNPASPMVQKIIEKILNKGSTN

SEQ ID NO: 104 - protein, 429 aa, Homo sapiens
METQFRRGGLGCSPASIKRKKKREDSGDFGLQVSTMFSEDDFQSTERAPYGPQLQWSQDLPRVQVFREQANLEDRSPRRTQRITGGEQVLWGPITQIFPTVRPADLTRVIMPLEQRSQHCKPEEGLQAQEEDLGLVGAQALQAEEQEAAFFSSTLNVGTLEELPAAESPSPPQSPQEESFSPTAMDAIFGSLSDEGSGSQEKEGPSTSPDLIDPESFSQDILHDKIIDLVHLLLRKYRVKGLITKAEMLGSVIKNYEDYFPEIFREASVCMQLLFGIDVKEVDPTSHSYVLVTSLNLSYDGIQCNEQSMPKSGLLIIVLGVIFMEGNCIPEEVMWEVLSIMGVYAGREHFLFGEPKRLLTQNWVQEKYLVYRQVPGTDPACYEFLWGPRAHAETSKMKVLEYIANANGRDPTSYPSLYEDALREEGEGV

SEQ ID NO: 105 - protein, 879 aa, Homo sapiens
MAGGGGDLSTRRLNECISPVANEMNHLPAHSHDLQRMFTEDQGVDDRLLYDIVFKHFKRNKVEISNAIKKTFPFLEGLRDRDLITNKMFEDSQDSCRNLVPVQRVVYNVLSELEKTFNLPVLEALFSDVNMQEYPDLIHIYKGFENVIHDKLPLQESEEEEREERSGLQLSLEQGTGENSFRSLTWPPSGSPSHAGTTPPENGLSEHPCETEQINAKRKDTTSDKDDSLGSQQTNEQCAQKAEPTESCEQIAVQVNNGDAGREMPCPLPCDEESPEAELHNHGIQINSCSVRLVDIKKEKPFSNSKVECQAQARTHHNQASDIIVISSEDSEGSTDVDEPLEVFISAPRSEPVINNDNPLESNDEKEGQEATCSRPQIVPEPMDFRKLSTFRESFKKRVIGQDHDFSESSEEEAPAEASSGALRSKHGEKAPMTSRSTSTWRIPSRKRRFSSSDFSDLSNGEELQETCSSSLRRGSGSQPQEPENKKCSCVMCFPKGVPRSQEARTESSQASDMMDTMDVENNSTLEKHSGKRRKKRRHRSKVNGLQRGRKKDRPRKHLTLNNKVQKKRWQQRGRKANTRPLKRRRKRGPRIPKDENINFKQSELPVTCGEVKGTLYKERFKQGTSKKCIQSEDKKWFTPREFEIEGDRGASKNWKLSIRCGGYTLKVLMENKFLPEPPSTRKKRILESHNNTLVDPCEEHKKKNPDASVKFSEFLKKCSETWKTIFAKEKGKFEDMAKADKAHYEREMKTYIPPKGEKKKKFKDPNAPKRPPLAFFLFCSEYRPKIKGEHPGLSIDDVVKKLAGMWNNTAAADKQFYEKKAAKLKEKYKKDIAAYRAKGKPNSAKKRVVKAEKSKKKKEEEEDEEDEQEEENEEDDDK

SEQ ID NO: 106 - protein, 585 aa, Homo sapiens
MTPPRLFWVWLLVAGTQGVNDGDMRLADGGATNQGRVEIFYRGQWGTVCDNLWDLTDASVVCRALGFENATQALGRAAFGQGSGPIMLDEVQCTGTEASLADCKSLGWLKSNCRHERDAGVVCTNETRSTHTLDLSRELSEALGQIFDSQRGCDLSISVNVQGEDALGFCGHTVILTANLEAQALWKEPGSNVTMSVDAECVPMVRDLLRYFYSRRIDITLSSVKCFHKLASAYGARQLQGYCASLFAILLPQDPSFQMPLDLYAYAVATGDALLEKLCLQFLAWNFEALTQAEAWPSVPTDLLQLLLPRSDLAVPSELALLKAVDTWSWGERASHEEVEGLVEKIRFPMMLPEELFELQFNLSLYWSHEALFQKKTLQALEFHTVPFQLLARYKGLNLTEDTYKPRIYTSPTWSAFVTDSSWSARKSQLVYQSRRGPLVKYSSDYFQAPSDYRYYPYQSFQTPQHPSFLFQDKRVSWSLVYLPTIQSCWNYGFSCSSDELPVLGLTKSGGSDRTIAYENKALMLCEGLFVADVTDFEGWKAAIPSALDTNSSKSTSSFPCPAGHFNGFRTVIRPFYLTNSSGVD

SEQ ID NO: 107 - protein, 185 aa, Homo sapiens
MSGSFELSVQDLNDLLSDGSGCYSLPSQPCNEVTPRIYVGNASVAQDIPKLQKLGITHVLNAAEGRSFMHVNTNANFYKDSGITYLGIKANDTQEFNLSAYFERAADFIDQALAQKNGRVLVHCREGYSRSPTLVIAYLMMRQKMDVKSALSIVRQNREIGPNDGFLAQLCQLNDRLAKEGKLKP

SEQ ID NO: 108 - protein, 702 aa, Homo sapiens
MESPSAPPHRWCIPWQRLLLTASLLTFWNPPTTAKLTIESTPFNVAEGKEVLLLVHNLPQHLFGYSWYKGERVDGNRQIIGYVIGTQQATPGPAYSGREIIYPNASLLIQNIIQNDTGFYTLHVIKSDLVNEEATGQFRVYPELPKPSISSNNSKPVEDKDAVAFTCEPETQDATYLWWVNNQSLPVSPRLQLSNGNRTLTLFNVTRNDTASYKCETQNPVSARRSDSVILNVLYGPDAPTISPLNTSYRSGENLNLSCHAASNPPAQYSWFVNGTFQQSTQELFIPNITVNNSGSYTCQAHNSDTGLNRTTVTTITVYAEPPKPFITSNNSNPVEDEDAVALTCEPEIQNTTYLWWVNNQSLPVSPRLQLSNDNRTLTLLSVTRNDVGPYECGIQNKLSVDHSDPVILNVLYGPDDPTISPSYTYYRPGVNLSLSCHAASNPPAQYSWLIDGNIQQHTQELFISNITEKNSGLYTCQANNSASGHSRTTVKTITVSAELPKPSISSNNSKPVEDKDAVAFTCEPEAQNTTYLWWVNGQSLPVSPRLQLSNGNRTLTLFNVTRNDARAYVCGIQNSVSANRSDPVTLDVLYGPDTPIISPPDSSYLSGANLNLSCHSASNPSPQYSWRINGIPQQHTQVLFIAKITPNNNGTYACFVSNLATGRNNSIVKSITVSASGTSPGLSAGATVGIMIGVLVGVALI

SEQ ID NO: 109 - protein, 308 aa, Homo sapiens
MAGKKNVLSSLAVYAEDSEPESDGEAGIEAVGSAAEEKGGLVSDAYGEDDFSRLGGDEDGYEEEEDENSRQSEDDDSETEKPEADDPKDNTEAEKRDPQELVASFSERVRNMSPDEIKIPPEPPGRCSNHLQDKIQKLYERKIKEGMDMNYIIQRKKEFRNPSIYEKLIQFCAIDELGTNYPKDMFDPHGWSEDSYYEALAKAQKIEMDKLEKAKKERTKIEFVTGTKKGTTTNATSTTTTTASTAVADAQKRKSKWDSAIPVTTIAQPTILTTTATLPAVVTVTTSASGSKTTVISAVGTIVKKAKQ

SEQ ID NO: 110 - protein, 592 aa, Homo sapiens
MASEIHMTGPMCLIENTNGRLMANPEALKILSAITQPMVVVAIVGLYRTGKSYLMNKLAGKKKGFSLGSTVQSHTKGIWMWCVPHPKKPGHILVLLDTEGLGDVEKGDNQNDSWIFALAVLLSSTFVYNSIGTINQQAMDQLYYVTELTHRIRSKSSPDENENEVEDSADFVSFFPDFVWTLRDFSLDLEADGQPLTPDEYLTYSLKLKKGTSQKDETFNLPRLCIRKFFPKKKCFVFDRPVHRRKLAQLEKLQDEELDPEFVQQVADFCSYIFSNSKTKTLSGGIQVNGPRLESLVLTYVNAISSGDLPCMENAVLALAQIENSAAVQKAIAHYEQQMGQKVQLPTETLQELLDLHRDSEREAIEVFIRSSFKDVDHLFQKELAAQLEKKRDDFCKQNQEASSDRCSALLQVIFSPLEEEVKAGIYSKPGGYRLFVQKLQDLKKKYYEEPRKGIQAEEILQTYLKSKESMTDAILQTDQTLTEKEKEIEVERVKAESAQASAKMLQEMQRKNEQMMEQKERSYQEHLKQLTEKMENDRVQLLKEQERTLALKLQEQEQLLKEGFQKESRIMKNEIQDLQTKMRRRKACTIS

SEQ ID NO: 111 - protein, 445 aa, Homo sapiens
MAVAIAAARVWRLNRGLSQAALLLLRQPGARGLARSHPPRQQQQFSSLDDKPQFPGASAEFIDKLEFIQPNVISGIPIYRVMDRQGQIINPSEDPHLPKEKVLKLYKSMTLLNTMDRILYESQRQGRISFYMTNYGEEGTHVGSAAALDNTDLVFGQYREAGVLMYRDYPLELFMAQCYGNISDLGKGRQMPVHYGCKERHFVTISSPLATQIPQAVGAAYAAKRANANRVVICYFGEGAASEGDAHAGFNFAATLECPIIFFCRNNGYAISTPTSEQYRGDGIAARGPGYGIMSIRVDGNDVFAVYNATKEARRRAVAENQPFLIEAMTYRIGHHSTSDDSSAYRSVDEVNYWDKQDHPISRLRHYLLSQGWWDEEQEKAWRKQSRRKVMEAFEQAERKPKPNPNLLFSDVYQEMPAQLRKQQESLARHLQTYGEHYPLDHFDK

SEQ ID NO: 112 - protein, 2386 aa, Homo sapiens
MLRGPGPGLLLLAVQCLGTAVPSTGASKSKRQAQQMVQPQSPVAVSQSKPGCYDNGKHYQINQQWERTYLGNALVCTCYGGSRGFNCESKPEAEETCFDKYTGNTYRVGDTYERPKDSMIWDCTCIGAGRGRISCTIANRCHEGGQSYKIGDTWRRPHETGGYMLECVCLGNGKGEWTCKPIAEKCFDHAAGTSYVVGETWEKPYQGWMMVDCTCLGEGSGRITCTSRNRCNDQDTRTSYRIGDTWSKKDNRGNLLQCICTGNGRGEWKCERHTSVQTTSSGSGPFTDVRAAVYQPQPHPQPPPYGHCVTDSGVVYSVGMQWLKTQGNKQMLCTCLGNGVSCQETAVTQTYGGNSNGEPCVLPFTYNGRTFYSCTTEGRQDGHLWCSTTSNYEQDQKYSFCTDHTVLVQTRGGNSNGALCHFPFLYNNHNYTDCTSEGRRDNMKWCGTTQNYDADQKFGFCPMAAHEEICTTNEGVMYRIGDQWDKQHDMGHMMRCTCVGNGRGEWTCIAYSQLRDQCIVDDITYNVNDTFHKRHEEGHMLNCTCFGQGRGRWKCDPVDQCQDSETGTFYQIGDSWEKYVHGVRYQCYCYGRGIGEWHCQPLQTYPSSSGPVEVFITETPSQPNSHPIQWNAPQPSHISKYILRWRPKNSVGRWKEATIPGHLNSYTIKGLKPGVVYEGQLISIQQYGHQEVTRFDFTTTSTSTPVTSNTVTGETTPFSPLVATSESVTEITASSFVVSWVSASDTVSGFRVEYELSEEGDEPQYLDLPSTATSVNIPDLLPGRKYIVNVYQISEDGEQSLILSTSQTTAPDAPPDTTVDQVDDTSIVVRWSRPQAPITGYRIVYSPSVEGSSTELNLPETANSVTLSDLQPGVQYNITIYAVEENQESTPVVIQQETTGTPRSDTVPSPRDLQFVEVTDVKVTIMWTPPESAVTGYRVDVIPVNLPGEHGQRLPISRNTFAEVTGLSPGVTYYFKVFAVSHGRESKPLTAQQTTKLDAPTNLQFVNETDSTVLVRWTPPRAQITGYRLTVGLTRRGQPRQYNVGPSVSKYPLRNLQPASEYTVSLVAIKGNQESPKATGVFTTLQPGSSIPPYNTEVTETTIVITWTPAPRIGFKLGVRPSQGGEAPREVTSDSGSIVVSGLTPGVEYVYTIQVLRDGQERDAPIVNKVVTPLSPPTNLHLEANPDTGVLTVSWERSTTPDITGYRITTTPTNGQQGNSLEEVVHADQSSCTFDNLSPGLEYNVSVYTVKDDKESVPISDTIIPAVPPPTDLRFTNIGPDTMRVTWAPPPSIDLTNFLVRYSPVKNEEDVAELSISPSDNAVVLTNLLPGTEYVVSVSSVYEQHESTPLRGRQKTGLDSPTGIDFSDITANSFTVHWIAPRATITGYRIRHHPEHFSGRPREDRVPHSRNSITLTNLTPGTEYVVSIVALNGREESPLLIGQQSTVSDVPRDLEVVAATPTSLLISWDAPAVTVRYYRITYGETGGNSPVQEFTVPGSKSTATISGLKPGVDYTITVYAVTGRGDSPASSKPISINYRTEIDKPSQMQVTDVQDNSISVKWLPSSSPVTGYRVTTTPKNGPGPTKTKTAGPDQTEMTIEGLQPTVEYVVSVYAQNPSGESQPLVQTAVTNIDRPKGLAFTDVDVDSIKIAWESPQGQVSRYRVTYSSPEDGIHELFPAPDGEEDTAELQGLRPGSEYTVSVVALHDDMESQPLIGTQSTAIPAPTDLKFTQVTPTSLSAQWTPPNVQLTGYRVRVTPKEKTGPMKEINLAPDSSSVVVSGLMVATKYEVSVYALKDTLTSRPAQGVVTTLENVSPPRRARVTDATETTITISWRTKTETITGFQVDAVPANGQTPIQRTIKPDVRSYTITGLQPGTDYKIYLYTLNDNARSSPVVIDASTAIDAPSNLRFLATTPNSLLVSWQPPRARITGYIIKYEKPGSPPREVVPRPRPGVTEATITGLEPGTEYTIYVIALKNNQKSEPLIGRKKTDELPQLVTLPHPNLHGPEILDVPSTVQKTPFVTHPGYDTGNGIQLPGTSGQQPSVGQQMIFEEHGFRRTTPPTTATPIRHRPRPYPPNVGEEIQIGHIPREDVDYHLYPHGPGLNPNASTGQEALSQTTISWAPFQDTSEYIISCHPVGTDEEPLQFRVPGTSTSATLTGLTRGATYNVIVEALKDQQRHKVREEVVTVGNSVNEGLNQPTDDSCFDPYTVSHYAVGDEWERMSESGFKLLCQCLGFGSGHFRCDSSRWCHDNGVNYKIGEKWDRQGENGQMMSCTCLGNGKGEFKCDPHEATCYDDGKTYHVGEQWQKEYLGAICSCTCFGGQRGWRCDNCRRPGGEPSPEGTTGQSYNQYSQRYHQRTNTNVNCPIECFMPLDVQADREDSRE

SEQ ID NO: 113 - protein, 247 aa, Homo sapiens
MQPILLLLAFLLLPRADAGEIIGGHEAKPHSRPYMAYLMIWDQKSLKRCGGFLIRDDFVLTAAHCWGSSINVTLGAHNIKEQEPTQQFIPVKRPIPHPAYNPKNFSNDIMLLQLERKAKRTRAVQPLRLPSNKAQVKPGQTCSVAGWGQTAPLGKHSHTLQEVKMTVQEDRKCESDLRHYYDSTIELCVGDPEIKKTSFKGDSGGPLVCNKVAQGIVSYGRNNGMPPRACTKVSSFVHWIKKTMKRY

SEQ ID NO: 114 - protein, 294 aa, Homo sapiens
MDGKQGGMDGSKPAGPRDFPGIRLLSNPLMGDAVSDWSPMHEAAIHGHQLSLRNLISQGWAVNIITADHVSPLHEACLGGHLSCVKILLKHGAQVNGVTADWHTPLFNACVSGSWDCVNLLLQHGASVQPESDLASPIHEAARRGHVECVNSLIAYGGNIDHKISHLGTPLYLACENQQRACVKKLLESGADVNQGKGQDSPLHAVARTASEELACLLMDFGADTQAKNAEGKRPVELVPPESPLAQLFLEREGPPSLMQLCRLRIRKCFGIQQHHKITKLVLPEDLKQFLLHL

SEQ ID NO: 115 - protein, 393 aa, Homo sapiens [sequence omitted]

SEQ ID NO: 116 - protein, 586 aa, Homo sapiens
MATATPVPPRMGSRAGGPTTPLSPTRLSRLQEKEELRELNDRLAVYIDKVRSLETENSALQLQVTEREEVRGRELTGLKALYETELADARRALDDTARERAKLQIELGKCKAEHDQLLLNYAKKESDLNGAQIKLREYEAALNSKDAALATALGDKKSLEGDLEDLKDQIAQLEASLAAAKKQLADETLLKVDLENRCQSLTEDLEFRKSMYEEEINETRRKHETRLVEVDSGRQIEYEYKLAQALHEMREQHDAQVRLYKEELEQTYHAKLENARLSSEMNTSTVNSAREELMESRMRIESLSSQLSNLQKESRACLERIQELEDLLAKEKDNSRRMLTDKEREMAEIRDQMQQQLNDYEQLLDVKLALDMEISAYRKLLEGEEERLKLSPSPSSRVTVSRASSSRSVRTTRGKRKRVDVEESEASSSVSISHSASATGNVCIEEIDVDGKFIRLKNTSEQDQPMGGWEMIRKIGDTSVSYKYTSRYVLKAGQTVTIWAANAGVTASPPTDLIWKNQNSWGTGEDVKVILKNSQGEEVAQRSTVFKTTIPEEEEEEEEAAGVVVEEELFHQQGTPRASNRSCAIM

SEQ ID NO: 117 - protein, 351 aa, Homo sapiens
MTEMSFLSSEVLVGDLMSPFDQSGLGAEESLGLLDDYLEVAKHFKPHGFSSDKAKAGSSEWLAVDGLVSPSNNSKEDAFSGTDWMLEKMDLKEFDLDALLGIDDLETMPDDLLTTLDDTCDLFAPLVQETNKQPPQTVNPIGHLPESLTKPDQVAPFTFLQPLPLSPGVLSSTPDHSFSLELGSEVDITEGDRKPDYTAYVAMIPQCIKEEDTPSDNDSGICMSPESYLGSPQHSPSTRGSPNRSLPSPGVLCGSARPKPYDPPGEKMVAAKVKGEKLDKKLKKMEQNKTAATRYRQKKRAEQEALTGECKELEKKNEALKERADSLAKEIQYLKDLIEEVRKARGKKRVP

SEQ ID NO: 118 - protein, 459 aa, Homo sapiens
MTAEEMKATESGAQSAPLPMEGVDISPKQDEGVLKVIKREGTGTEMPMIGDRVFVHYTGWLLDGTKFDSSLDRKDKFSFDLGKGEVIKAWDIAIATMKVGEVCHITCKPEYAYGSAGSPPKIPPNATLVFEVELFEFKGEDLTEEEDGGIIRRIQTRGEGYAKPNEGAIVEVALEGYYKDKLFDQRELRFEIGEGENLDLPYGLERAIQRMEKGEHSIVYLKPSYAFGSVGKEKFQIPPNAELKYELHLKSFEKAKESWEMNSEEKLEQSTIVKERGTVYFKEGKYKQALLQYKKIVSWLEYESSFSNEEAQKAQALRLASHLNLAMCHLKLQAFSAAIESCNKALELDSNNEKGLFRRGEAHLAVNDFELARADFQKVLQLYPNNKAAKTQLAVCQQRIRRQLAREKKLYANMFERLAEEENKAKAEASSGDHPTDTEMKEEQKSNTAGSQSQVETEA

SEQ ID NO: 119 - protein, 512 aa, Homo sapiens
MSGRRFHLSTTDRVIKAVPFPPTQRLTFKEVFENGKPKVDVLKNHLVKEGRLEEEVALKIINDGAAILRQEKTMIEVDAPITVCGDIHGQFFDLMKLFEVGGSPSNTRYLFLGDYVDRGYFSIECVLYLWSLKINHPKTLFLLRGNHECRHLTDYFTFKQECRIKYSEQVYDACMETFDCLPLAALLNQQFLCVHGGMSPEITSLDDIRKLDRFTEPPAFGPVCDLLWSDPSEDYGNEKTLEHYTHNTVRGCSYFYSYPAVCEFLQNNNLLSIIRAHEAQDAGYRMYRKSQATGFPSLITIFSAPNYLDVYNNKAAVLKYENNVMNIRQFNCSPHPYWLPNFMDVFTWSLPFVGEKVTEMLVNVLNICSDDELISDDEAEGSTTVRKEIIRNKIRAIGKMARVFSILRQESESVLTLKGLTPTGTLPLGVLSGGKQTIETATVEAVEAREAIRGFSLQHKIRSFEEARGLDRINERMPPRKDSIHAGGPMKSVTSAHSHAAHRSDQGKKAHS

SEQ ID NO: 120 - protein, 2351 aa, Homo sapiens
MQIELSTCFFLCLLRFCFSATRRYYLGAVELSWDYMQSDLGELPVDARFPPRVPKSFPFNTSVVYKKTLFVEFTDHLFNIAKPRPPWMGLLGPTIQAEVYDTVVITLKNMASHPVSLHAVGVSYWKASEGAEYDDQTSQREKEDDKVFPGGSHTYVWQVLKENGPMASDPLCLTYSYLSHVDLVKDLNSGLIGALLVCREGSLAKEKTQTLHKFILLFAVFDEGKSWHSETKNSLMQDRDAASARAWPKMHTVNGYVNRSLPGLIGCHRKSVYWHVIGMGTTPEVHSIFLEGHTFLVRNHRQASLEISPITFLTAQTLLMDLGQFLLFCHISSHQHDGMEAYVKVDSCPEEPQLRMKNNEEAEDYDDDLTDSEMDVVRFDDDNSPSFIQIRSVAKKHPKTWVHYIAAEEEDWDYAPLVLAPDDRSYKSQYLNNGPQRIGRKYKKVRFMAYTDETFKTREAIQHESGILGPLLYGEVGDTLLIIFKNQASRPYNIYPHGITDVRPLYSRRLPKGVKHLKDFPILPGEIFKYKWTVTVEDGPTKSDPRCLTRYYSSFVNMERDLASGLIGPLLICYKESVDQRGNQIMSDKRNVILFSVFDENRSWYLTENIQRFLPNPAGVQLEDPEFQASNIMHSINGYVFDSLQLSVCLHEVAYWYILSIGAQTDFLSVFFSGYTFKHKMVYEDTLTLFPFSGETVFMSMENPGLWILGCHNSDFRNRGMTALLKVSSCDKNTGDYYEDSYEDISAYLLSKNNAIEPRSFSQNSRHPSTRQKQFNATTIPENDIEKTDPWFAHRTPMPKIQNVSSSDLLMLLRQSPTPHGLSLSDLQEAKYETFSDDPSPGAIDSNNSLSEMTHFRPQLHHSGDMVFTPESGLQLRLNEKLGTTAATELKKLDFKVSSTSNNLISTIPSDNLAAGTDNTSSLGPPSMPVHYDSQLDTTLFGKKSSPLTESGGPLSLSEENNDSKLLESGLMNSQESSWGKNVSSTESGRLFKGKRAHGPALLTKDNALFKVSISLLKTNKTSNNSATNRKTHIDGPSLLIENSPSVWQNILESDTEFKKVTPLIHDRMLMDKNATALRLNHMSNKTTSSKNMEMVQQKKEGPIPPDAQNPDMSFFKMLFLPESARWIQRTHGKNSLNSGQGPSPKQLVSLGPEKSVEGQNFLSEKNKVVVGKGEFTKDVGLKEMVFPSSRNLFLTNLDNLHENNTHNQEKKIQEEIEKKETLIQENVVLPQIHTVTGTKNFMKNLFLLSTRQNVEGSYDGAYAPVLQDFRSLNDSTNRTKKHTAHFSKKGEEENLEGLGNQTKQIVEKYACTTRISPNTSQQNFVTQRSKRALKQFRLPLEETELEKRIIVDDTSTQWSKNMKHLTPSTLTQIDYNEKEKGAITQSPLSDCLTRSHSIPQANRSPLPIAKVSSFPSIRPIYLTRVLFQDNSSHLPAASYRKKDSGVQESSHFLQGAKKNNLSLAILTLEMTGDQREVGSLGTSATNSVTYKKVENTVLPKPDLPKTSGKVELLPKVHIYQKDLFPTETSNGSPGHLDLVEGSLLQGTEGAIKWNEANRPGKVPFLRVATESSAKTPSKLLDPLAWDNHYGTQIPKEEWKSQEKSPEKTAFKKKDTILSLNACESNHAIAAINEGQNKPEIEVTWAKQGRTERLCSQNPPVLKRHQREITRTTLQSDQEEIDYDDTISVEMKKEDFDIYDEDENQSPRSFQKKTRHYFIAAVERLWDYGMSSSPHVLRNRAQSGSVPQFKKVVFQEFTDGSFTQPLYRGELNEHLGLLGPYIRAEVEDNIMVTFRNQASRPYSFYSSLISYEEDQRQGAEPRKNFVKPNETKTYFWKVQHHMAPTKDEFDCKAWAYFSDVDLEKDVHSGLIGPLLVCHTNTLNPAHGRQVTVQEFALFFTIFDETKSWYFTENMERNCRAPCNIQMEDPTFKENYRFHAINGYIMDTLPGLVMAQDQRIRWYLLSMGSNENIHSIHFSGHVFTVRKKEEYKMALYNLYPGVFETVEMLPSKAGIWRVECLIGEHLHAGMSTLFLVYSNKCQTPLGMASGHIRDFQITASGQYGQWAPKLARLHYSGSINAWSTKEPFSWIKVDLLAPMIIHGIKTQGARQKFSSLYISQFIIMYSLDGKKWQTYRGNSTGTLMVFFGNVDSSGIKHNIFNPPIIARYIRLHPTHYSIRSTLRMELMGCDLNSCSMPLGMESKAISDAQITASSYFTNMFATWSPSKARLHLQGRSNAWRPQVNNPKEWLQVDFQKTMKVTGVTTQGVKSLLTSMYVKEFLISSSQDGHQWTLFFQNGKVKVFQGNQDSFTPVVNSLDPPLLTRYLRIHPQSWVHQIALRMEVLGCEAQDLY

SEQ ID NO: 121 - protein, 1722 aa, Homo sapiens
MSDPRQSQEEKHKLGRASSKFKDPPRIMQSDDYFARKFKAINGNMGPTTSLNASNSNETGGGGPANGTPAVPKMGVRARVSEWPPKKDCSKELTCKALWESRSQTSYESITSVLQNGQSDQSEGQQDEQLDLDFVEAKYTIGDIFVHSPQRGLHPIRQRSNSDVTISDIDAEDVLDQNAVNPNTGAALHREYGSTSSIDRQGLSGENFFAMLRGYRVENYDHKAMVPFGFPEFFRCDPAISPSLHAAAQISRGEFVRISGLDYVDSALLMGRDRDKPFKRRLKSESVETSLFRKLRTVKSEHETFKFTSELEESRLERGIRPWNCQRCFAHYDVQSILFNINEAMATRANVGKRKNITTGASAASQTQMPTGQTGNCESPLGSKEDLNSKENLDADEGDGKSNDLVLSCPYFRNETGGEGDRRIALSRANSSSFSSGESCSFESSLSSHCTNAGVSVLEVPRENQPIHREKVKRYIIEHIDLGAYYYRKFFYGKEHQNYFGIDENLGPVAVSIRREKVEDAKEKEGSQFNYRVAFRTSELTTLRGAILEDAIPSTARHGTARGLPLKEVLEYVIPELSIQCLRQASNSPKVSEQLLKLDEQGLSFQHKIGILYCKAGQSTEEEMYNNETAGPAFEEFLDLLGQRVRLKGFSKYRAQLDNKTDSTGTHSLYTTYKDYELMFHVSTLLPYMPNNRQQLLRKRHIGNDIVTIVFQEPGALPFTPKSIRSHFQHVFVIVKVHNPCTENVCYSVGVSRSKDVPPFGPPIPKGVTFPKSAVFRDFLLAKVINAENAAHKSEKFRAMATRTRQEYLKDLAENFVTTATVDTSVKFSFITLGAKKKEKVKPRKDAHLFSIGAIMWHVIARDFGQSADIECLLGISNEFIMLIEKDSKNVVFNCSCRDVIGWTSGLVSIKVFYERGECVLLSSVDNCAEDIREIVQRLVIVTRGCETVEMTLRRNGLGQLGFHVNFEGIVADVEPFGFAWKAGLRQGSRLVEICKVAVATLTHEQMIDLLRTSVTVKVVIIQPHDDGSPRRGCSELCRIPMVEYKLDSEGTPCEYKTPFRRNTTWHRVPTPALQPLSRASPIPGTPDRLPCQQLLQQAQAAIPRSTSFDRKLPDGTRSSPSNQSSSSDPGPGGSGPWRPQVGYDGCQSPLLLEHQGSGPLECDGAREREDTMEASRHPETKWHGPPSKVLGSYKERALQKDGSCKDSPNKLSHIGDKSCSSHSSSNTLSSNTSSNSDDKHFGSGDLMDPELLGLTYIKGASTDSGIDTAPCMPATILGPVHLAGSRSLIHSRAEQWADAADVSGPDDEPAKLYSVHGYASTISAGSAAEGSMGDLSEISSHSSGSHHSGSPSAHCSKSSGSLDSSKVYIVSHSSGQQVPGSMSKPYHRQGAVNKYVIGWKKSEGSPPPEEPEVTECPGMYSEMDVMSTATQHQTVVGDAVAETQHVLSKEDFLKLMLPDSPLVEEGRRKFSFYGNLSPRRSLYRTLSDESICSNRRGSSFGSSRSSVLDQALPNDILFSTTPPYHSTLPPRAHPAPSMGSLRNEFWFSDGSLSDKSKCADPGLMPLPDTATGLDWTHLVDAARAFEGLDSDEELGLLCHHTSYLDQRVASFCTLTDMQHGQDLEGAQELPLCVDPGSGKEFMDTTGERSPSPLTGKVNQLELILRQLQTDLRKEKQDKAVLQAEVQHLRQDNMRLQEESQTATAQLRKFTEWFFTTIDKKS

SEQ ID NO: 122 - protein, 642 aa, Homo sapiens
MAAAAAATAAAAASIRERQTVALKRMLNFNVPHIKNSTGEPVWKVLIYDRFGQDIISPLLSVKELRDMGITLHLLLHSDRDPIPDVPAVYFVMPTEENIDRMCQDLRNQLYESYYLNFISAISRSKLEDIANAALAASAVTQVAKVFDQYLNFITLEDDMFVLCNQNKELVSYRAINRPDITDTEMETVMDTIVDSLFCFFVTLGAVPIIRCSRGTAAEMVAVKLDKKLRENLRDARNSLFTGDTLGAGQFSFQRPLLVLVDRNIDLATPLHHTWTYQALVHDVLDFHLNRVNLEESSGVENSPAGARPKRKNKKSYDLTPVDKFWQKHKGSPFPEVAESVQQELESYRAQEDEVKRLKSIMGLEGEDEGAISMLSDNTAKLTSAVSSLPELLEKKRLIDLHTNVATAVLEHIKARKLDVYFEYEEKIMSKTTLDKSLLDIISDPDAGTPEDKMRLFLIYYISTQQAPSEADLEQYKKALTDAGCNLNPLQYIKQWKAFTKMASAPASYGSTTTKPMGLLSRVMNTGSQFVMEGVKNLVLKQQNLPVTRILDNLMEMKSNPETDDYRYFDPKMLRGNDSSVPRNKNPFQEAIVFVVGGGNYIEYQNLVDYIKGKQGKHILYGCSELFNATQFIKQLSQLGQK

SEQ ID NO: 123 - protein, 860 aa, Homo sapiens
MSRGGSYPHLLWDVRKRSLGLEDPSRLRSRYLGRREFIQRLKLEATLNVHDGCVNTICWNDTGEYILSGSDDTKLVISNPYSRKVLTTIRSGHRANIFSAKFLPCTNDKQIVSCSGDGVIFYTNVEQDAETNRQCQFTCHYGTTYEIMTVPNDPYTFLSCGEDGTVRWFDTRIKTSCTKEDCKDDILINCRRAATSVAICPPIPYYLAVGCSDSSVRIYDRRMLGTRATGNYAGRGTTGMVARFIPSHLNNKSCRVTSLCYSEDGQEILVSYSSDYIYLFDPKDDTARELKTPSAEERREELRQPPVKRLRLRGDWSDTGPRARPESERERDGEQSPNVSLMQRMSDMLSRWFEEASEVAQSNRGRGRSRPRGGTSQSDISTLPTVPSSPDLEVSETAMEVDTPAEQFLQPSTSSTMSAQAHSTSSPTESPHSTPLLSSPDSEQRQSVEASGHHTHHQSDNNNEKLSPKPGTGEPVLSLHYSTEGTTTSTIKLNFTDEWSSIASSSRGIGSHCKSEGQEESFVPQSSVQPPEGDSETKAPEESSEDVTKYQEGVSAENPVENHINITQSDKFTAKPLDSNSGERNDLNLDRSCGVPEESASSEKAKEPETSDQTSTESATNENNTNPEPQFQTEATGPSAHEETSTRDSALQDTDDSDDDPVLIPGARYRAGPGDRRSAVARIQEFFRRRKERKEMEELDTLNIRRPLVKMVYKGHRNSRTMIKEANFWGANFVMSGSDCGHIFIWDRHTAEHLMLLEADNHVVNCLQPHPFDPILASSGIDYDIKIWSPLEESRIFNRKLADEVITRNELMLEETRNTITVPASFMLRMLASLNHIRADRLEGDRSEGSGQENENEDEE

SEQ ID NO: 124 - protein, 725 aa, Homo sapiens
MVMKASVDDDDSGWELSMPEKMEKSNTNWVDITQDFEEACRELKLGELLHDKLFGLFEAMSAIEMMDPKMDAGMIGNQVNRKVLNFEQAIKDGTIKIKDLTLPELIGIMDTCFCCLITWLEGHSLAQTVFTCLYIHNPDFIEDPAMKAFALGILKICDIAREKVNKAAVFEEEDFQSMTYGFKMANSVTDLRVTGMLKDVEDDMQRRVKSTRSRQGEERDPEVELEHQQCLAVFSRVKFTRVLLTVLIAFTKKETSAVAEAQKLMVQAADLLSAIHNSLHHGIQAQNDTTKGDHPIMMGFEPLVNQRLLPPTFPRYAKIIKREEMVNYFARLIDRIKTVCEVVNLTNLHCILDFFCEFSEQSPCVLSRSLLQTTFLVDNKKVFGTHLMQDMVKDALRSFVSPPVLSPKCYLYNNHQAKDCIDSFVTHCVRPFCSLIQIHGHNRARQRDKLGHILEEFATLQDEAEKVDAALHTMLLKQEPQRQHLACLGTWVLYHNLRIMIQYLLSGFELELYSMHEYYYIYWYLSEFLYAWLMSTLSRADGSQMAEERIMEEQQKGRSSKKTKKKKKVRPLSREITMSQAYQNMCAGMFKTMVAFDMDGKVRKPKFELDSEQVRYEHRFAPFNSVMTPPPVHYLQFKEMSDLNKYSPPPQSPELYVAASKHFQQAKMILENIPNPDHEVNRILKVAKPNFVVMKLLAGGHKKESKVPPEFDFSAHKYFPVVKLV

SEQ ID NO: 125 - protein, 391 aa, Homo sapiens
MSGPVPSRARVYTDVNTHRPREYWDYESHVVEWGNQDDYQLVRKLGRGKYSEVFEAINITNNEKVVVKILKPVKKKKIKREIKILENLRGGPNIITLADIVKDPVSRTPALVFEHVNNTDFKQLYQTLTDYDIRFYMYEILKALDYCHSMGIMHRDVKPHNVMIDHEHRKLRLIDWGLAEFYHPGQEYNVRVASRYFKGPELLVDYQMYDYSLDMWSLGCMLASMIFRKEPFFHGHDNYDQLVRIAKVLGTEDLYDYIDKYNIELDPRFNDILGRHSRKRWERFVHSENQHLVSPEALDFLDKLLRYDHQSRLTAREAMEHPYFYTVVKDQARMGSSSMPGGSTPVSSANMMSGISSVPTPSPLGPLAGSPVIAAANPLGMPVPAAAGAQQ

SEQ ID NO: 126 - protein, 107 aa, Homo sapiens
MARAALSAAPSNPRLLRVALLLLLLVAAGRRAAGASVATELRCQCLQTLQGIHPKNIQSVNVKSPGPHCAQTEVIATLKNGRKACLNPASPIVKKIIEKMLNSDKSN

SEQ ID NO: 127 - protein, 1978 aa, Homo sapiens
MSRPRFNPRGDFPLQRPRAPNPSGMRPPGPFMRPGSMGLPRFYPAGRARGIPHRFAGHESYQNMGPQRMNVQVTQHRTDPRLTKEKLDFHEAQQKKGKPHGSRWDDEPHISASVAVKQSSVTQVTEQSPKVQSRYTKESASSILASFGLSNEDLEELSRYPDEQLTPENMPLILRDIRMRKMGRRLPNLPSQSRNKETLGSEAVSSNVIDYGHASKYGYTEDPLEVRIYDPEIPTDEVENEFQSQQNISASVPNPNVICNSMFPVEDVFRQMDFPGESSNNRSFFSVESGTKMSGLHISGGQSVLEPIKSVNQSINQTVSQTMSQSLIPPSMNQQPFSSELISSVSQQERIPHEPVINSSNVHVGSRGSKKNYQSQADIPIRSPFGIVKASWLPKFSHADAQKMKRLPTPSMMNDYYAASPRIFPHLCSLCNVECSHLKDWIQHQNTSTHIESCRQLRQQYPDWNPEILPSRRNEGNRKENETPRRRSHSPSPRRSRRSSSSHRFRRSRSPMHYMYRPRSRSPRICHRFISRYRSRSRSRSPYRIRNPFRGSPKCFRSVSPERMSRRSVRSSDRKKALEDVVQRSGHGTEFNKQKHLEAADKGHSPAQKPKTSSGTKPSVKPTSATKSDSNLGGHSIRCKSKNLEDDTLSECKQVSDKAVSLQRKLRKEQSLHYGSVLLITELPEDGCTEEDVRKLFQPFGKVNDVLIVPYRKEAYLEMEFKEAITAIMKYIETTPLTIKGKSVKICVPGKKKAQNKEVKKKTLESKKVSASTLKRDADASKAVEIVTSTSAAKTGQAKASVAKVNKSTGKSASSVKSVVTVAVKGNKASIKTAKSGGKKSLEAKKTGNVKNKDSNKPVTIPENSEIKTSIEVKATENCAKEAISDAALEATENEPLNKETEEMCVMLVSNLPNKGYSVEEVYDLAKPFGGLKDILILSSHKKAYIEINRKAAESMVKFYTCFPVLMDGNQLSISMAPENMNIKDEEAIFITLVKENDPEANIDTIYDRFVHLDNLPEDGLQCVLCVGLQFGKVDHHVFISNRNKAILQLDSPESAQSMYSFLKQNPQNIGDHMLTCSLSPKIDLPEVQIEHDPELEKESPGLKNSPIDESEVQTATDSPSVKPNELEEESTPSIQTETLVQQEEPCEEEAEKATCDSDFAVETLELETQGEEVKEEIPLVASASVSIEQFTENAEECALNQQMFNSDLEKKGAEIINPKTALLPSDSVFAEERNLKGILEESPSEAEDFISGITQTMVEAVAEVEKNETVSEILPSTCIVTLVPGIPTGDEKTVDKKNISEKKGNMDEKEEKEFNTKETRMDLQIGTEKAEKNEGRMDAEKVEKMAAMKEKPAENTLFKAYPNKGVGQANKPDETSKTSILAVSDVSSSKPSIKAVIVSSPKAKATVSKTENQKSFPKSVPRDQINAEKKLSAKEFGLLKPTSARSGLAESSSKFKPTQSSLTRGGSGRISALQGKLSKLDYRDITKQSQETEARPSIMKRDDSNNKTLAEQNTKNPKSTTGRSSKSKEEPLFPFNLDEFVTVDEVIEEVNPSQAKQNPLKGKRKETLKNVPFSELNLKKKKGKTSTPRGVEGELSFVTLDEIGEEEDAAAHLAQALVTVDEVIDEEELNMEEMVKNSNSLFTLDELIDQDDCISHSEPKDVTVLSVAEEQDLLKQERLVTVDEIGEVEELPLNESADITFATLNTKGNEGDTVRDSIGFISSQVPEDPSTLVTVDEIQDDSSDLHLVTLDEVTEEDEDSLADFNNLKEELNFVTVDEVGEEEDGDNDLKVELAQSKNDHPTDKKGNRKKRAVDTKKTKLESLSQVGPVNENVMEEDLKTMIERHLTAKTPTKRVRIGKTLPSEKAVVTEPAKGEEAFQMSEVDEESGLKDSEPERKRKKTEDSSSGKSVASDVPEELDFLVPKAGFFCPICSLFYSGEKAMTNHCKSTRHKQNTEKFMAKQRKEKEQNEAEERSSR

SEQ ID NO: 128 - protein, 508 aa, Homo sapiens
MLRRALLCLAVAALVRADAPEEEDHVLVLRKSNFAEALAAHKYLLVEFYAPWCGHCKALAPEYAKAAGKLKAEGSEIRLAKVDATEESDLAQQYGVRGYPTIKFFRNGDTASPKEYTAGREADDIVNWLKKRTGPAATTLPDGAAAESLVESSEVAVIGFFKDVESDSAKQFLQAAEAIDDIPFGITSNSDVFSKYQLDKDGVVLFKKFDEGRNNFEGEVTKENLLDFIKHNQLPLVIEFTEQTAPKIFGGEIKTHILLFLPKSVSDYDGKLSNFKTAAESFKGKILFIFIDSDHTDNQRILEFFGLKKEECPAVRLITLEEEMTKYKPESEELTAERITEFCHRFLEGKIKPHLMSQELPEDWDKQPVKVLVGKNFEDVAFDEKKNVFVEFYAPWCGHCKQLAPIWDKLGETYKDHENIVIAKMDSTANEVEAVKVHSFPTLKFFPASADRTVIDYNGERTLDGFKKFLESGGQDGAGDDDDLEDLEEAEEPDMEEDDDQKAVKDEL

SEQ ID NO: 129 - protein, 1441 aa, Homo sapiens
MSGLGDSSSDPANPDSHKRKGSPCDTLASSTEKRRREQENKYLEELAELLSANISDIDSLSVKPDKCKILKKTVDQIQLMKRMEQEKSTTDDDVQKSDISSSSQGVIEKESLGPLLLEALDGFFFVVNCEGRIVFVSENVTSYLGYNQEELMNTSVYSILHVGDHAEFVKNLLPKSLVNGVPWPQEATRRNSHTFNCRMLIHPPDEPGTENQEACQRYEVMQCFTVSQPKSIQEDGEDFQSCLICIARRLPRPPAITGVESFMTKQDTTGKIISIDTSSLRAAGRTGWEDLVRKCIYAFFQPQGREPSYARQLFQEVMTRGTASSPSYRFILNDGTMLSAHTKCKLCYPQSPDMQPFIMGIHIIDREHSGLSPQDDTNSGMSIPRVNPSVNPSISPAHGVARSSTLPPSNSNMVSTRINRQQSSDLHSSSHSNSSNSQGSFGCSPGSQIVANVALNQGQASSQSSNPSLNLNNSPMEGTGISLAQFMSPRRQVTSGLATRPRMPNNSFPPNISTLSSPVGMTSSACNNNNRSYSNIPVTSLQGMNEGPNNSVGFSASSPVLRQMSSQNSPSRLNIQPAKAESKDNKEIASILNEMIQSDNSSSDGKPLDSGLLHNNDRLSDGDSKYSQTSHKLVQLLTTTAEQQLRHADIDTSCKDVLSCTGTSNSASANSSGGSCPSSHSSLTERHKILHRLLQEGSPSDITTLSVEPDKKDSASTSVSVTGQVQGNSSIKLELDASKKKESKDHQLLRYLLDKDEKDLRSTPNLSLDDVKVKVEKKEQMDPCNTNPTPMTKPTPEEIKLEAQSQFTADLDQFDQLLPTLEKAAQLPGLCETDRMDGAVTSVTIKSEILPASLQSATARPTSRLNRLPELELEAIDNQFGQPGTGDQIPWTNNTVTAINQSKSEDQCISSQLDELLCPPTTVEGRNDEKALLEQLVSFLSGKDETELAELDRALGIDKLVQGGGLDVLSERFPPQQATPPLIMEERPNLYSQPYSSPSPTANLPSPFQGMVRQKPSLGTMPVQVTPPRGAFSPGMGMQPRQTLNRPPAAPNQLRLQLQQRLQGQQQLIHQNRQAILNQFAATAPVGINMRSGMQQQITPQPPLNAQMLAQRQRELYSQQHRQRQLIQQQRAMLMRQQSFGNNLPPSSGLPVQMGNPRLPQGAPQQFPYPPNYGTNPGTPPASTSPFSQLAANPEASLANRNSMVSRGMTGNIGGQFGTGINPQMQQNVFQYPGAGMVPQGEANFAPSLSPGSSMVPMPIPPPQSSLLQQTPPASGYQSPDMKAWQQGAIGNNNVFSQAVQNQPTPAQPGVYNNMSITVSMAGGNTNVQNMNPMMAQMQMSSLQMPGMNTVCPEQINDPALRHTGLYCNQLSSTDLLKTEADGTQQVQQVQVFADVQCTVNLVGGDPYLNQPGPLGTQKPTSGPQTPQAQQKSLLQQLLTE

SEQ ID NO: 130 - protein, 393 aa, Homo sapiens [sequence omitted]

SEQ ID NO: 131 - protein, 440 aa, Homo sapiens
MGSSHLLNKGLPLGVRPPIMNGPLHPRPLVALLDGRDCTVEMPILKDVATVAFCDAQSTQEIHEKVLNEAVGALMYHTITLTREDLEKFKALRIIVRIGSGFDNIDIKSAGDLGIAVCNVPAASVEETADSTLCHILNLYRRATWLHQALREGTRVQSVEQIREVASGAARIRGETLGIIGLGRVGQAVALRAKAFGFNVLFYDPYLSDGVERALGLQRVSTLQDLLFHSDCVTLHCGLNEHNHHLINDFTVKQMRQGAFLVNTARGGLVDEKALAQALKEGRIRGAALDVHESEPFSFSQGPLKDAPNLICTPHAAWYSEQASIEMREEAAREIRRAITGRIPDSLKNCVNKDHLTAATHWASMDPAVVHPELNGAAYRYPPGVVGVAPTGIPAAVEGIVPSAMSLSHGLPPVAHPPHAPSPGQTVKPEADRDHASDQL

SEQ ID NO: 132 - protein, 1278 aa, Homo sapiens
MAQSKRHVYSRTPSGSRMSAEASARPLRVGSRVEVIGKGHRGTVAYVGATLFATGKWVGVILDEAKGKNDGTVQGRKYFTCDEGHGIFVRQSQIQVFEDGADTTSPETPDSSASKVLKREGTDTTAKTSKLRGLKPKKAPTARKTTTRRPKPTRPASTGVAGASSSLGPSGSASAGELSSSEPSTPAQTPLAAPIIPTPVLTSPGAVPPLPSPSKEEEGLRAQVRDLEEKLETLRLKRAEDKAKLKELEKHKIQLEQVQEWKSKMQEQQADLQRRLKEARKEAKEALEAKERYMEEMADTADAIEMATLDKEMAEERAESLQQEVEALKERVDELTTDLEILKAEIEEKGSDGAASSYQLKQLEEQNARLKDALVRMRDLSSSEKQEHVKLQKLMEKKNQELEVVRQQRERLQEELSQAESTIDELKEQVDAALGAEEMVEMLTDRNLNLEEKVRELRETVGDLEAMNEMNDELQENARETELELREQLDMAGARVREAQKRVEAAQETVADYQQTIKKYRQLTAHLQDVNRELTNQQEASVERQQQPPPETFDFKIKFAETKAHAKAIEMELRQMEVAQANRHMSLLTAFMPDSFLRPGGDHDCVLVLLLMPRLICKAELIRKQAQEKFELSENCSERPGLRGAAGEQLSFAAGLVYSLSLLQATLHRYEHALSQCSVDVYKKVGSLYPEMSAHERSLDFLIELLHKDQLDETVNVEPLTKAIKYYQHLYSIHLAEQPEDCTMQLADHIKFTQSALDCMSVEVGRLRAFLQGGQEATDIALLLRDLETSCSDIRQFCKKIRRRMPGTDAPGIPAALAFGPQVSDTLLDCRKHLTWVVAVLQEVAAAAAQLIAPLAENEGLLVAALEELAFKASEQIYGTPSSSPYECLRQSCNILISTMNKLATAMQEGEYDAERPPSKPPPVELRAAALRAEITDAEGLGLKLEDRETVIKELKKSLKIKGEELSEANVRLSLLEKKLDSAAKDADERIEKVQTRLEETQALLRKKEKEFEETMDALQADIDQLEAEKAELKQRLNSQSKRTIEGLRGPPPSGIATLVSGIAGEEQQRGAIPGQAPGSVPGPGLVKDSPLLLQQISAMRLHISQLQHENSILKGAQMKASLASLPPLHVAKLSHEGPGSELPAGALYRKTSQLLETLNQLSTHTHVVDITRTSPAAKSPSAQLMEQVAQLKSLSDTVEKLKDEVLKETVSQRPGATVPTDFATFPSSAFLRAKEEQQDDTVYMGKVTFSCAAGFGQRHRLVLTQEQLHQLHSRLIS

SEQ ID NO: 133 - protein, 1756 aa, Homo sapiens
MNSLFRKRNKGKYSPTVQTRSISNKELSELIEQLQKNADQVEKNIVDTEAKMQSDLARLQEGRQPEHRDVTLQKVLDSEKLLYVLEADAAIAKHMKHPQGDMIAEDIRQLKERVTNLRGKHKQIYRLAVKEVDPQVNWAALVEEKLDKLNNQSFGTDLPLVDHQVEEHNIFHNEVKAIGPHLAKDGDKEQNSELRAKYQKLLAASQARQQHLSSLQDYMQRCTNELYWLDQQAKGRMQYDWSDRNLDYPSRRRQYENFINRNLEAKEERINKLHSEGDQLLAAEHPGRNSIEAHMEAVHADWKEYLNLLICEESHLKYMEDYHQFHEDVKDAQELLRKVDSDLNQKYGPDFKDRYQIELLLRELDDQEKVLDKYEDVVQGLQKRGQQVVPLKYRRETPLKPIPVEALCDFEGEQGLISRGYSYTLQKNNGESWELMDSAGNKLIAPAVCFVIPPTDPEALALADSLGSQYRSVRQKAAGSKRTLQQRYEVLKTENPGDASDLQGRQLLAGLDKVASDLDRQEKAITGILRPPLEQGRAVQDSAERAKDLKNITNELLRIEPEKTRSTAEGEAFIQALPGSGTTPLLRTRVEDTNRKYEHLLQLLDLAQEKVDVANRLEKSLQQSWELLATHENHLNQDDTVPESSRVLDSKGQELAAMACELQAQKSLLGEVEQNLQAAKQCSSTLASRFQEHCPDLERQEAEVHKLGQRFNNLRQQVERRAQSLQSAKAAYEHFHRGHDHVLQFLVSIPSYEPQETDSLSQMETKLKNQKNLLDEIASREQEVQKICANSQQYQQAVKDYELEAEKLRSLLDLENGRRSHVSKRARLQSPATKVKEEEAALAAKFTEVYAINRQRLQNLEFALNLLRQQPEVEVTHETLQRNRPDSGVEEAWKIRKELDEETERRRQLENEVKSTQEEIWTLRNQGPQESVVRKEVLKKVPDPVLEESFQQLQRTLAEEQHKNQLLQEELEALQLQLRALEQETRDGGQEYVVKEVLRIEPDRAQADEVLQLREELEALRRQKGAREAEVLLLQQRVAALAEEKSRAQEKVTEKEVVKLQNDPQLEAEYQQLQEDHQRQDQLREKQEEELSFLQDKLKRLEKERAMAEGKITVKEVLKVEKDAATEREVSDLTRQYEDEAAKARASQREKTELLRKIWALEEENAKVVVQEKVREIVRPDPKAESEVANLRLELVEQERKYRGAEEQLRSYQSELEALRRRGPQVEVKEVTKEVIKYKTDPEMEKELQRLREEIVDKTRLIERCDLEIYQLKKEIQALKDTKPQVQTKEVVQEILQFQEDPQTKEEVASLRAKLSEEQKKQVDLERERASQEEQIARKEEELSRVKERVVQQEVVRYEEEPGLRAEASAFAESIDVELRQIDKLRAELRRLQRRRTELERQLEELERERQARREAEREVQRLQQRLAALEQEEAEAREKVTHTQKVVLQQDPQQAREHALLRLQLEEEQHRRQLLEGELETLRRKLAALEKAEVKEKVVLSESVQVEKGDTEQEIQRLKSSLEEESRSKRELDVEVSRLEARLSELEFHNSKSSKELDFLREENHKLQLERQNLQLETRRLQSEINMAATETRDLRNMTVADSGTNHDSRLWSLERELDDLKRLSKDKDLEIDELQKRLGSVAVKREQRENHLRRSIVVIHPDTGRELSPEEAHRAGLIDWNMFVKLRSQECDWEEISVKGPNGESSVIHDRKSGKKFSIEEALQSGRLTPAQYDRYVNKDMSIQELAVLVSGQK

SEQ ID NO: 134 - protein, 200 aa, Homo sapiens
MGNSKSGALSKEILEELQLNTKFSEEELCSWYQSFLKDCPTGRITQQQFQSIYAKFFPDTDPKAYAQHVFRSFDSNLDGTLDFKEYVIALHMTTAGKTNQKLEWAFSLYDVDGNGTISKNEVLEIVMAIFKMITPEDVKLLPDDENTPEKRAEKIWKYFGKNDDDKLTEKEFIEGTLANKEILRLIQFEPQKVKEKMKNA

SEQ ID NO: 135 - protein, 453 aa, Homo sapiens
MSWSLHPRNLILYFYALLFLSSTCVAYVATRDNCCILDERFGSYCPTTCGIADFLSTYQTKVDKDLQSLEDILHQVENKTSEVKQLIKAIQLTYNPDESSKPNMIDAATLKSRKMLEEIMKYEASILTHDSSIRYLQEIYNSNNQKIVNLKEKVAQLEAQCQEPCKDTVQIHDITGKDCQDIANKGAKQSGLYFIKPLKANQQFLVYCEIDGSGNGWTVFQKRLDGSVDFKKNWIQYKEGFGHLSPTGTTEFWLGNEKIHLISTQSAIPYALRVELEDWNGRTSTADYAMFKVGPEADKYRLTYAYFAGGDAGDAFDGFDFGDDPSDKFFTSHNGMQFSTWDNDNDKFEGNCAEQDGSGWWMNKCHAGHLNGVYYQGGTYSKASTPNGYDNGIIWATWKTRWYSMKKTTMKIIPFNRLTIGEGQQHHLGGAKQVRPEHPAETEYDSLYPEDDL

SEQ ID NO: 136 - protein, 508 aa, Homo sapiens
MGSCCSCPDKDTVPDNHRNKFKVINVDDDGNELGSGIMELTDTELILYTRKRDSVKWHYLCLRRYGYDSNLFSFESGRRCQTGQGIFAFKCARAEELFNMLQEIMQNNSINVVEEPVVERNNHQTELEVPRTPRTPTTPGFAAQNLPNGYPRYPSFGDASSHPSSRHPSVGSARLPSVGEESTHPLLVAEEQVHTYVNTTGVQEERKNRTSVHVPLEARVSNAESSTPKEEPSSIEDRDPQILLEPEGVKFVLGPTPVQKQLMEKEKLEQLGRDQVSGSGANNTEWDTGYDSDERRDAPSVNKLVYENINGLSIPSASGVRRGRLTSTSTSDTQNINNSAQRRTALLNYENLPSLPPVWEARKLSRDEDDNLGPKTPSLNGYHNNLDPMHNYVNTENVTVPASAHKIEYSRRRDCTPTVFNFDIRRPSLEHRQLNYIQVDLEGGSDSDNPQTPKTPTTPLPQTPTRRTELYAVIDIERTAAMSNLQKALPRDDGTSRKTRHNSTDLPM

SEQ ID NO: 137 - protein, 639 aa, Homo sapiens
MSARGPAIGIDLGTTYSCVGVFQHGKVEIIANDQGNRTTPSYVAFTDTERLIGDAAKNQVAMNPTNTIFDAKRLIGRKFEDATVQSDMKHWPFRVVSEGGKPKVQVEYKGETKTFFPEEISSMVLTKMKEIAEAYLGGKVHSAVITVPAYFNDSQRQATKDAGTITGLNVLRIINEPTAAAIAYGLDKKGCAGGEKNVLIFDLGGGTFDVSILTIEDGIFEVKSTAGDTHLGGEDFDNRMVSHLAEEFKRKHKKDIGPNKRAVRRLRTACERAKRTLSSSTQASIEIDSLYEGVDFYTSITRARFEELNADLFRGTLEPVEKALRDAKLDKGQIQEIVLVGGSTRIPKIQKLLQDFFNGKELNKSINPDEAVAYGAAVQAAILIGDKSENVQDLLLLDVTPLSLGIETAGGVMTPLIKRNTTIPTKQTQTFTTYSDNQSSVLVQVYEGERAMTKDNNLLGKFDLTGIPPAPRGVPQIEVTFDIDANGILNVTAADKSTGKENKITITNDKGRLSKDDIDRMVQEAERYKSEDEANRDRVAAKNALESYTYNIKQTVEDEKLRGKISEQDKNKILDKCQEVINWLDRNQMAEKDEYEHKQKELERVCNPIISKLYQGGPGGGSGGGGSGASGGPTIEEVD

SEQ ID NO: 138 - protein, 418 aa, Homo sapiens
MAMASPAIGQRPYPLLLDPEPPRYLQSLSGPELPPPPPDRSSRLCVPAPLSTAPGAREGRSARRAARGNLEPPPRASRPARPLRPGLQQRLRRRPGAPRPRDVRSIFEQPQDPRVPAERGEGHCFAELVLPGGPGWCDLCGREVLRQALRCTNCKFTCHPECRSLIQLDCSQQEGLSRDRPSPESTLTVTFSQNVCKPVEETQRPPTLQEIKQKIDSYNTREKNCLGMKLSEDGTYTGFIKVHLKLRRPVTVPAGIRPQSIYDAIKEVNLAATTDKRTSFYLPLDAIKQLHISSTTTVSEVIQGLLKKFMVVDNPQKFALFKRIHKDGQVLFQKLSIADRPLYLRLLAGPDTEVLSFVLKENETGEVEWDAFSIPELQNFLTILEKEEQDKIQQVQKKYDKFRQKLEEALRESQGKPG

SEQ ID NO: 139 - protein, 1496 aa, Homo sapiens
MAEERPPRLVDYFVVAGLAGNGAPIPEETWVPEPSGPLRPPRPAEPITDVAVIARALGEEVPQGYTCIQASAGGHPLELSAGLLGGTQPVICYRRGRDKPPLVELGVLYEGKERPKPGFQVLDTTPYSHSANLAPPGPGHPRTYLTYRRAAEGAGLHALGITDLCLVLPSKGEGTPHTYCRLPRNLNPGMWGPAVYLCYKVGLAKANTLVYEAELLGRYPEEDNEAFPLPESVPVFCLPMGATIECWPAQTKYPVPVFSTFVLTGAAGDKVYGAALQFYEAFPRARLSERQARALGLLSAVERGRALGGRAVRSRRAIAVLSRWPAFPAFRAFLTFLYRYSVSGPHRLPLEAHISHFIHNVPFPSPQRPRILVQMSPYDNLLLCQPVSSPLPLSGASFLQLLQSLGPELAITLLLAVLTEHKLLVHSLRPDLLTSVCEALVSMIFPLHWQCPYIPLCPLVLADVLSAPVPFIVGIHSSYFDLHDPPADVICVDLDTNTLFQTEEKKLLSPRTLPRRPYKVLLATLTNLYQQLDQTYTGPEEEASLEFLLTDYEAVCGRRARLEREVQGAFLRFMACLLKGYRVFLRPLTQAPSEGARDVDNLFFLQGFLKSRERSSHKLYSQLLHTQMFSQFIEECSFGSARHAALEFFDSCVEKVHPEQEKPEPTPLVELEELSGSELTVFITPPEEPALPEGSESTPQYCYDGFPELRAELFESLQEQPGALPVPGPSRSAPSSPAPRRTKQEMKVAQRMAQKSAAVPELWARCLLGHCYGLWFLCLPAYVRSAPSRVQALHTAYHVLRQMESGKVVLPDEVCYRVLMQLCSHYGQPVLSVRVMLEMRQAGIVPNTITYGYYNKAVLESKWPSGTPGGRLRWAKLRNVVLGAAQFRQPLRERQQQQQQQQQQQQQQQQEQVSAHQEAGSSQAEPYLERPSPTRPLQRQTTWAGRSLRDPASPPGRLVKSGSLGSARGAQPTVEAGVAHMIEALGVLEPRGSPVPWHDGSLSDLSLTGEEPLPGGSPGGSGSALSAQSTEALEGLSGRGPKAGGRQDEAGTPRRGLGARLQQLLTPSRHSPASRIPPPELPPDLPPPARRSPMDSLLHPRERPGSTASESSASLGSEWDLSESSLSNLSLRRSSERLSDTPGSFQSPSLEILLSSCSLCRACDSLVYDEEIMAGWAPDDSNLNTTCPFCACPFVPLLSVQTLDSRPSVPSPKSAGASGSKDAPVPGGPGPVLSDRRLCLALDEPQLCNGHMGGASRRVESGAWAYLSPLVLRKELESLVENEGSEVLALPELPSAHPIIFWNLLWYFQRLRLPSILPGLVLASCDGPSHSQAPSPWLTPDPASVQVRLLWDVLTPDPNSCPPLYVLWRVHSQIPQRVVWPGPVPASLSLALLESVLRHVGLNEVHKAVGLLLETLGPPPTGLHLQRGIYREILFLTMAALGKDHVDIVAFDKKYKSAFNKLASSMGKEELRHRRAQMPTPKAIDCRKCFGAPPEC

SEQ ID NO: 140 - protein, 361 aa, Homo sapiens
MSKCARKKYIKTNPRQMTMETVESQHDGSITASLTESKSAHVQTQTGQNSIPALAQVSVAGSGTRRGSPAVTLVQLPSGQTIHVQGVIQTPQPWVIQSSEIHTVQVAAIAETDESAESEGVIDSHKRREILSRRPSYRKILNELSSDVPGVPKIEEERSEEEGTPPSIATMAVPTSIYQTSTGQYIAIAQGGTIQISNPGSDGVQGLQALTMTNSGAPPPGATIVQYAAQSADGTQQFFVPGSQVVVQDEETELAPSHMAAATGDMPTYQIRAPTAALPQGVVMAASPGSLHSPQQLAEEATRKRELRLMKNREAAKECRRRKKEYVKCLESRVAVLEVQNKKLIEELETLKDICSPKTDY

SEQ ID NO: 141 - protein, 782 aa, Homo sapiens
MAPHRPAPALLCALSLALCALSLPVRAATASRGASQAGAPQGRVPEARPNSMVVEHPEFLKAGKEPGLQIWRVEKFDLVPVPTNLYGDFFTGDAYVILKTVQLRNGNLQYDLHYWLGNECSQDESGAAAIFTVQLDDYLNGRAVQHREVQGFESATFLGYFKSGLKYKKGGVASGFKHVVPNEVVVQRLFQVKGRRVVRATEVPVSWESFNNGDCFILDLGNNIHQWCGSNSNRYERLKATQVSKGIRDNERSGRARVHVSEEGTEPEAMLQVLGPKPALPAGTEDTAKEDAANRKLAKLYKVSNGAGTMSVSLVADENPFAQGALKSEDCFILDHGKDGKIFVWKGKQANTEERKAALKTASDFITKMDYPKQTQVSVLPEGGETPLFKQFFKNWRDPDQTDGLGLSYLSSHIANVERVPFDAATLHTSTAMAAQHGMDDDGTGQKQIWRIEGSNKVPVDPATYGQFYGGDSYIILYNYRHGGRQGQIIYNWQGAQSTQDEVAASAILTAQLDEELGGTPVQSRVVQGKEPAHLMSLFGGKPMIIYKGGTSREGGQTAPASTRLFQVRANSAGATRAVEVLPKAGALNSNDAFVLKTPSAAYLWVGTGASEAEKTGAQELLRVLRAQPVQVAEGSEPDGFWEALGGKAAYRTSPRLKDKKMDAHPPRLFACSNKIGRFVIEEVPGELMQEDLATDDVMLLDTWDQVFVWVGKDSQEEEKTEALTSAKRYIETDPANRDRRTPITVVKQGFEPPSFVGWFLGWDDDYWSVDPLDRAMAELAA

SEQ ID NO: 142 - protein, 1139 aa, Homo sapiens
MPSGGDQSPPPPPPPPAAAASDEEEEDDGEAEDAAPPAESPTPQIQQRFDELCSRLNMDEAARAEAWDSYRSMSESYTLEGNDLHWLACALYVACRKSVPTVSKGTVEGNYVSLTRILKCSEQSLIEFFNKMKKWEDMANLPPHFRERTERLERNFTVSAVIFKKYEPIFQDIFKYPQEEQPRQQRGRKQRRQPCTVSEIFHFCWVLFIYAKGNFPMISDDLVNSYHLLLCALDLVYGNALQCSNRKELVNPNFKGLSEDFHAKDSKPSSDPPCIIEKLCSLHDGLVLEAKGIKEHFWKPYIRKLYEKKLLKGKEENLTGFLEPGNFGESFKAINKAYEEYVLSVGNLDERIFLGEDAEEEIGTLSRCLNAGSGTETAERVQMKNILQQHFDKSKALRISTPLTGVRYIKENSPCVTPVSTATHSLSRLHTMLTGLRNAPSEKLEQILRTCSRDPTQAIANRLKEMFEIYSQHFQPDEDFSNCAKEIASKHFRFAEMLYYKVLESVIEQEQKRLGDMDLSGILEQDAFHRSLLACCLEVVTFSYKPPGNFPFITEIFDVPLYHFYKVIEVFIRAEDGLCREVVKHLNQIEEQILDHLAWKPESPLWEKIRDNENRVPTCEEVMPPQNLERADEICIAGSPLTPRRVTEVRADTGGLGRSITSPTTLYDRYSSPPASTTRRRLFVENDSPSDGGTPGRMPPQPLVNAVPVQNVSGETVSVTPVPGQTLVTMATATVTANNGQTVTIPVQGIANENGGITFFPVQVNVGGQAQAVTGSIQPLSAQALAGSLSSQQVTGTTLQVPGQVAIQQISPGGQQQKQGQSVTSSSNRPRKTSSLSLFFRKVYHLAAVRLRDLCAKLDISDELRKKIWTCFEFSIIQCPELMMDRHLDQLLMCAIYVMAKVTKEDKSFQNIMRCYRTQPQARSQVYRSVLIKGKRKRRNSGSSDSRSHQNSPTELNKDRTSRDSSPVMRSSSTLPVPQPSSAPPTPTRLTGANSDMEEEERGDLIQFYNNIYIKQIKTFAMKYSQANMDAPPLSPYPFVRTGSPRRIQLSQNHPVYISPHKNETMLSPREKIFYYFSNSPSKRLREINSMIRTGETPTKKRGILLEDGSESPAKRICPENHSALLRRLQDVANDRGSH

SEQ ID NO: 143 - protein, 452 aa, Homo sapiens
MDDIFTQCREGNAVAVRLWLDNTENDLNQGDDHGFSPLHWACREGRSAVVEMLIMRGARINVMNRGDDTPLHLAASHGHRDIVQKLLQYKADINAVNEHGNVPLHYACFWGQDQVAEDLVANGALVSICNKYGEMPVDKAKAPLRELLRERAEKMGQNLNRIPYKDTFWKGTTRTRPRNGTLNKHSGIDFKQLNFLTKLNENHSGELWKGRWQGNDIVVKVLKVRDWSTRKSRDFNEECPRLRIFSHPNVLPVLGACQSPPAPHPTLITHWMPYGSLYNVLHEGTNFVVDQSQAVKFALDMARGMAFLHTLEPLIPRHALNSRSVMIDEDMTARISMADVKFSFQCPGRMYAPAWVAPEALQKKPEDTNRRSADMWSFAVLLWELVTREVPFADLSNMEIGMKVALEGLRPTIPPGISPHVCKLMKICMNEDPAKRPKFDMIVPILEKMQDK

SEQ ID NO: 144 - protein, 1863 aa, Homo sapiens
MDLSALRVEEVQNVINAMQKILECPICLELIKEPVSTKCDHIFCKFCMLKLLNQKKGPSQCPLCKNDITKRSLQESTRFSQLVEELLKIICAFQLDTGLEYANSYNFAKKENNSPEHLKDEVSIIQSMGYRNRAKRLLQSEPENPSLQETSLSVQLSNLGTVRTLRTKQRIQPQKTSVYIELGSDSSEDTVNKATYCSVGDQELLQITPQGTRDEISLDSAKKAACEFSETDVTNTEHHQPSNNDLNTTEKRAAERHPEKYQGSSVSNLHVEPCGTNTHASSLQHENSSLLLTKDRMNVEKAEFCNKSKQPGLARSQHNRWAGSKETCNDRRTPSTEKKVDLNADPLCERKEWNKQKLPCSENPRDTEDVPWITLNSSIQKVNEWFSRSDELLGSDDSHDGESESNAKVADVLDVLNEVDEYSGSSEKIDLLASDPHEALICKSERVHSKSVESNIEDKIFGKTYRKKASLPNLSHVTENLIIGAFVTEPQIIQERPLTNKLKRKRRPTSGLHPEDFIKKADLAVQKTPEMINQGTNQTEQNGQVMNITNSGHENKTKGDSIQNEKNPNPIESLEKESAFKTKAEPISSSISNMELELNIHNSKAPKKNRLRRKSSTRHIHALELVVSRNLSPPNCTELQIDSCSSSEEIKKKKYNQMPVRHSRNLQLMEGKEPATGAKKSNKPNEQTSKRHDSDTFPELKLTNAPGSFTKCSNTSELKEFVNPSLPREEKEEKLETVKVSNNAEDPKDLMLSGERVLQTERSVESSSISLVPGTDYGTQESISLLEVSTLGKAKTEPNKCVSQCAAFENPKGLIHGCSKDNRNDTEGFKYPLGHEVNHSRETSIEMEESELDAQYLQNTFKVSKRQSFAPFSNPGNAEEECATFSAHSGSLKKQSPKVTFECEQKEENQGKNESNIKPVQTVNITAGFPVVGQKDKPVDNAKCSIKGGSRFCLSSQFRGNETGLITPNKHGLLQNPYRIPPLFPIKSFVKTKCKKNLLEENFEEHSMSPEREMGNENIPSTVSTISRNNIRENVFKEASSSNINEVGSSTNEVGSSINEIGSSDENIQAELGRNRGPKLNAMLRLGVLQPEVYKQSLPGSNCKHPEIKKQEYEEVVQTVNTDFSPYLISDNLEQPMGSSHASQVCSETPDDLLDDGEIKEDTSFAENDIKESSAVFSKSVQKGELSRSPSPFTHTHLAQGYRRGAKKLESSEENLSSEDEELPCFQHLLFGKVNNIPSQSTRHSTVATECLSKNTEENLLSLKNSLNDCSNQVILAKASQEHHLSEETKCSASLFSSQCSELEDLTANTNTQDPFLIGSSKQMRHQSESQGVGLSDKELVSDDEERGTGLEENNQEEQSMDSNLGEAASGCESETSVSEDCSGLSSQSDILTTQQRDTMQHNLIKLQQEMAELEAVLEQHGSQPSNSYPSIISDSSALEDLRNPEQSTSEKAVLTSQKSSEYPISQNPEGLSADKFEVSADSSTSKNKEPGVERSSPSKCPSLDDRWYMHSCSGSLQNRNYPSQEELIKVVDVEEQQLEESGPHDLTETSYLPRQDLEGTPYLESGISLFSDDPESDPSEDRAPESARVGNIPSSTSALKVPQLKVAESAQSPAAAHTTDTAGYNAMEESVSREKPELTASTERVNKRMSMVVSGLTPEEFMLVYKFARKHHITLTNLITEETTHVVMKTDAEFVCERTLKYFLGIAGGKWVVSYFWVTQSIKERKMLNEHDFEVRGDVVNGRNHQGPKRARESQDRKIFRGLEICCYGPFTNMPTDQLEWMVQLCGASVVKELSSFTLGTGVHPIVVVQPDAWTEDNGFHAIGQMCEAPVVTREWVLDSVALYQCQELDTYLIPQIPHSHY

SEQ ID NO: 145 - protein, 825 aa, Homo sapiens
MGWLCSGLLFPVSCLVLLQVASSGNMKVLQEPTCVSDYMSISTCEWKMNGPTNCSTELRLLYQLVFLLSEAHTCIPENNGGAGCVCHLLMDDVVSADNYTLDLWAGQQLLWKGSFKPSEHVKPRAPGNLTVHTNVSDTLLLTWSNPYPPDNYLYNHLTYAVNIWSENDPADFRIYNVTYLEPSLRIAASTLKSGISYRARVRAWAQCYNTTWSEWSPSTKWHNSYREPFEQHLLLGVSVSCIVILAVCLLCYVSITKIKKEWWDQIPNPARSRLVAIIIQDAQGSQWEKRSRGQEPAKCPHWKNCLTKLLPCFLEHNMKRDEDPHKAAKEMPFQGSGKSAWCPVEISKTVLWPESISVVRCVELFEAPVECEEEEEVEEEKGSFCASPESSRDDFQEGREGIVARLTESLFLDLLGEENGGFCQQDMGESCLLPPSGSTSAHMPWDEFPSAGPKEAPPWGKEQPLHLEPSPPASPTQSPDNLTCTETPLVIAGNPAYRSFSNSLSQSPCPRELGPDPLLARHLEEVEPEMPCVPQLSEPTTVPQPEPETWEQILRRNVLQHGAAAAPVSAPTSGYQEFVHAVEQGGTQASAVVGLGPPGEAGYKAFSSLLASSAVSPEKCGFGASSGEEGYKPFQDLIPGCPGDPAPVPVPLFTFGLDREPPRSPQSSHLPSSSPEHLGLEPGEKVEDMPKPPLPQEQATDPLVDSLGSGIVYSALTCHLCGHLKQCHGQEDGGQTPVMASPCCGCCCGDRSSPPTTPLRAPDPSPGGVPLEASLCPASLAPSGISEKSKSSSSFHPAPGNAQSSSQTPKIVNFVSVGPTYMRVS

SEQ ID NO: 146 - protein, 114 aa, Homo sapiens
MSLLSSRAARVPGPSSSLCALLVLLLLLTQPGPIASAGPAAAVLRELRCVCLQTTQGVHPKMISNLQVFAIGPQCSKVEVVASLKNGKEICLDPEAPFLKKVIQKILDGGNKEN

SEQ ID NO: 147 - protein, 665 aa, Homo sapiens
MVEAIVEFDYQAQHDDELTISVGEIITNIRKEDGGWWEGQINGRRGLFPDNFVREIKKEMKKDPLTNKAPEKPLHEVPSGNSLLSSETILRTNKRGERRRRRCQVAFSYLPQNDDELELKVGDIIEVVGEVEEGWWEGVLNGKTGMFPSNFIKELSGESDELGISQDEQLSKSSLRETTGSESDGGDSSSTKSEGANGTVATAAIQPKKVKGVGFGDIFKDKPIKLRPRSIEVENDFLPVEKTIGKKLPATTATPDSSKTEMDSRTKSKDYCKVIFPYEAQNDDELTIKEGDIVTLINKDCIDVGWWEGELNGRRGVFPDNFVKLLPPDFEKEGNRPKKPPPPSAPVIKQGAGTTERKHEIKKIPPERPEMLPNRTEEKERPEREPKLDLQKPSVPAIPPKKPRPPKTNSLSRPGALPPRRPERPVGPLTHTRGDSPKIDLAGSSLSGILDKDLSDRSNDIDLEGFDSVVSSTEKLSHPTTSRPKATGRRPPSQSLTSSSLSSPDIFDSPSPEEDKEEHISLAHRGVDASKKTSKTVTISQVSDNKASLPPKPGTMAAGGGGPAPLSSAAPSPLSSSLGTAGHRANSPSLFGTEGKPKMEPAASSQAAVEELRTQVRELRSIIETMKDQQKREIKQLLSELDEEKKIRLRLQMEVNDIKKALQSK

SEQ ID NO: 148 - protein, 1804 aa, Homo sapiens
MTSLKRSQTERPLATDRASVVGTDGTPKVHTDDFYMRRFRSQNGSLGSSVMAPVGPPRSEGSHHITSTPGVPKMGVRARIADWPPRKENIKESSRSSQEIETSSCLDSLSSKSSPVSQGSSVSLNSNDSAMLKSIQNTLKNKTRPSENMDSRFLMPEAYPSSPRKALRRIRQRSNSDITISELDVDSFDECISPTYKTGPSLHREYGSTSSIDKQGTSGESFFDLLKGYKDDKSDRGPTPTKLSDFLITGGGKGSGFSLDVIDGPISQRENLRLFKEREKPLKRRSKSETGDSSIFRKLRNAKGEELGKSSDLEDNRSEDSVRPWTCPKCFAHYDVQSILFDLNEAIMNRHNVIKRRNTTTGASAAAVASLVSGPLSHSASFSSPMGSTEDLNSKGSLSMDQGDDKSNELVMSCPYFRNEIGGEGERKISLSKSNSGSFSGCESASFESTLSSHCTNAGVAVLEVPKENLVLHLDRVKRYIVEHVDLGAYYYRKFFYQKEHWNYFGADENLGPVAVSIRREKPDEMKENGSPYNYRIIFRTSELMTLRGSVLEDAIPSTAKHSTARGLPLKEVLEHVVPELNVQCLRLAFNTPKVTEQLMKLDEQGLNYQQKVGIMYCKAGQSTEEEMYNNESAGPAFEEFLQLLGERVRLKGFEKYRAQLDTKTDSTGTHSLYTTYKDYEIMFHVSTMLPYTPNNKQQLLRKRHIGNDIVTIVFQEPGAQPFSPKNIRSHFQHVFVIVRVHNPCSDSVCYSVAVTRSRDVPSFGPPIPKGVTFPKSNVFRDFLLAKVINAENAAHKSEKFRAMATRTRQEYLKDLAEKNVTNTPIDPSGKFPFISLASKKKEKSKPYPGAELSSMGAIVWAVRAEDYNKAMELDCLLGISNEFIVLIEQETKSVVFNCSCRDVIGWTSTDTSLKIFYERGECVSVGSFINIEEIKEIVKRLQFVSKGCESVEMTLRRNGLGQLGFHVNYEGIVADVEPYGYAWQAGLRQGSRLVEICKVAVATLSHEQMIDLLRTSVTVKVVIIPPHDDCTPRRSCSETYRMPVMEYKMNEGVSYEFKFPFRNNNKWQRNASKGPHSPQVPSQVQSPMTSRLNAGKGDGKMPPPERAANIPRSISSDGRPLERRLSPGSDIYVTVSSMALARSQCRNSPSNLSSSSDTGSVGGTYRQKSMPEGFGVSRRSPASIDRQNTQSDIGGSGKSTPSWQRSEDSIADQMAYSYRGPQDFNSFVLEQHEYTEPTCHLPAVSKVLPAFRESPSGRLMRQDPVVHLSPNKQGHSDSHYSSHSSSNTLSSNASSAHSDEKWYDGDRTESELNSYNYLQGTSADSGIDTTSYGPSHGSTASLGAATSSPRSGPGKEKVAPLWHSSSEVISMADRTLETESHGLDRKTESSLSLDIHSKSQAGSTPLTRENSTFSINDAASHTSTMSSRHSASPVVFTSARSSPKEELHPAAPSQLAPSFSSSSSSSSGPRSFYPRQGATSKYLIGWKKPEGTINSVGFMDTRKRHQSDGNEIAHTRLRASTRDLRASPKPTSKSTIEEDLKKLIDLESPTPESQKSFKFHALSSPQSPFPSTPTSRRALHRTLSDESIYNSQREHFFTSRASLLDQALPNDVLFSSTYPSLPKSLPLRRPSYTLGMKSLHGEFSASDSSLTDIQETRRQPMPDPGLMPLPDTAADLDWSNLVDAAKAYEVQRASFFAASDENHRPLSAASNSDQLEDQALAQMKPYSSSKDSSPTLASKVDQLEGMLKMLREDLKKEKEDKAHLQAEVQHLREDNLRLQEESQNASDKLKKFTEWVFNTIDMS

SEQ ID NO: 149 - protein, 572 aa, Homo sapiens
MAAPRPSPAISVSVSAPAFYAPQKKFGPVVAPKPKVNPFRPGDSEPPPAPGAQRAQMGRVGEIPPPPPEDFPLPPPPLAGDGDDAEGALGGAFPPPPPPIEESFPPAPLEEEIFPSPPPPPEEEGGPEAPIPPPPQPREKVSSIDLEIDSLSSLLDDMTKNDPFKARVSSGYVPPPVATPFSSKSSTKPAAGGTAPLPPWKSPSSSQPLPQVPAPAQSQTQFHVQPQPQPKPQVQLHVQSQTQPVSLANTQPRGPPASSPAPAPKFSPVTPKFTPVASKFSPGAPGGSGSQPNQKLGHPEALSAGTGSPQPPSFTYAQQREKPRVQEKQHPVPPPAQNQNQVRSPGAPGPLTLKEVEELEQLTQQLMQDMEHPQRQNVAVNELCGRCHQPLARAQPAVRALGQLFHIACFTCHQCAQQLQGQQFYSLEGAPYCEGCYTDTLEKCNTCGEPITDRMLRATGKAYHPHCFTCVVCARPLEGTSFIVDQANRPHCVPDYHKQYAPRCSVCSEPIMPEPGRDETVRVVALDKNFHMKCYKCEDCGKPLSIEADDNGCFPLDGHVLCRKCHTARAQT

SEQ ID NO: 150 - protein, 370 aa, Homo sapiens
MDAPRQVVNFGPGPAKLPHSVLLEIQKELLDYKGVGISVLEMSHRSSDFAKIINNTENLVRELLAVPDNYKVIFLQGGGCGQFSAVPLNLIGLKAGRCADYVVTGAWSAKAAEEAKKFGTINIVHPKLGSYTKIPDPSTWNLNPDASYVYYCANETVHGVEFDFIPDVKGAVLVCDMSSNFLSKPVDVSKFGVIFAGAQKNVGSAGVTVVIVRDDLLGFALRECPSVLEYKVQAGNSSLYNTPPCFSIYVMGLVLEWIKNNGGAAAMEKLSSIKSQTIYEIIDNSQGFYVCPVEPQNRSKMNIPFRIGNAKGDDALEKRFLDKALELNMLSLKGHRSVGGIRASLYNAVTIEDVQKLAAFMKKFLEMHQL

SEQ ID NO: 151 - protein, 425 aa, Homo sapiens
MSSILPFTPPIVKRLLGWKKGEQNGQEEKWCEKAVKSLVKKLKKTGQLDELEKAITTQNVNTKCITIPRSLDGRLQVSHRKGLPHVIYCRLWRWPDLHSHHELRAMELCEFAFNMKKDEVCVNPYHYQRVETPVLPPVLVPRHTEIPAEFPPLDDYSHSIPENTNFPAGIEPQSNIPETPPPGYLSEDGETSDHQMNHSMDAGSPNLSPNPMSPAHNNLDLQPVTYCEPAFWCSISYYELNQRVGETFHASQPSMTVDGFTDPSNSERFCLGLLSNVNRNAAVELTRRHIGRGVRLYYIGGEVFAECLSDSAIFVQSPNCNQRYGWHPATVCKIPPGCNLKIFNNQEFAALLAQSVNQGFEAVYQLTRMCTIRMSFVKGWGAEYRRQTVTSTPCWIELHLNGPLQWLDKVLTQMGSPSIRCSSVS

SEQ ID NO: 152 - protein, 504 aa, Homo sapiens
MAAQRRSLLQSEQQPSWTDDLPLCHLSGVGSASNRSYSADGKGTESHPPEDSWLKFRSENNCFLYGVFNGYDGNRVTNFVAQRLSAELLLGQLNAEHAEADVRRVLLQAFDVVERSFLESIDDALAEKASLQSQLPEGVPQHQLPPQYQKILERLKTLEREISGGAMAVVAVLLNNKLYVANVGTNRALLCKSTVDGLQVTQLNVDHTTENEDELFRLSQLGLDAGKIKQVGIICGQESTRRIGDYKVKYGYTDIDLLSAAKSKPIIAEPEIHGAQPLDGVTGFLVLMSEGLYKALEAAHGPGQANQEIAAMIDTEFAKQTSLDAVAQAVVDRVKRIHSDTFASGGERARFCPRHEDMTLLVRNFGYPLGEMSQPTPSPAPAAGGRVYPVSVPYSSAQSTSKTSVTLSLVMPSQGQMVNGAHSASTLDEATPTLTNQSPTLTLQSTNTHTQSSSSSSDGGLFRSRPAHSLPPGEDGRVEPYVDFAEFYRLWSVDHGEQSVVTAP

SEQ ID NO: 153 - protein, 354 aa, Homo sapiens
MAESPTEEAATAGAGAAGPGASSVAGVVGVSGSGGGFGPPFLPDVWAAAAAAGGAGGPGSGLAPLPGLPPSAAAHGAALLSHWDPTLSSDWDGERTAPQCLLRIKRDIMSIYKEPPPGMFVVPDTVDMTKIHALITGPFDTPYEGGFFLFVFRCPPDYPIHPPRVKLMTTGNNTVRFNPNFYRNGKVCLSILGTWTGPAWSPAQSISSVLISIQSLMTENPYHNEPGFEQERHPGDSKNYNECIRHETIRVAVCDMMEGKCPCPEPLRGVMEKSFLEYYDFYEVACKDRLHLQGQTMQDPFGEKRGHFDYQSLLMRLGLIRQKVLERLHNENAEMDSDSSSSGTETDLHGSLRV

SEQ ID NO: 154 - protein, 354 aa, Homo sapiens; identical to SEQ ID NO: 153

SEQ ID NO: 155 - protein, 213 aa, Homo sapiens
MSVELEEALPVTTAEGMAKKVTKAGGSAALSPSKKRKNSKKKNQPGKYSQLVVETIRRLGERNGSSLAKIYTEAKKVPWFDQQNGRTYLKYSIKALVQNDTLLQVKGTGANGSFKLNRKKLEGGGERRGAPAAATAPAPTAHKAKKAAPGAAGSRRADKKPARGQKPEQRSHKKGAGAKKDKGGKAKKTAAAGGKKVKKAAKPSVPKVPKGRK

SEQ ID NO: 156 - protein, 261 aa, Homo sapiens
MVVVAAAPNPADGTPKVLLLSGQPASAAGAPAGQALPLMVPAQRGASPEAASGGLPQARKRQRLTHLSPEEKALRRKLKNRVAAQTARDRKKARMSELEQQVVDLEEENQKLLLENQLLREKTHGLVVENQELRQRLGMDALVAEEEAEAKGNEVRPVAGSAESAALRLRAPLQQVQAQLSPLQNISPWILAVLTLQIQSLISCWAFWTTWTQSCSSNALPQSLPAWRSSQRSTQKDPVPYQPPFLCQWGRHQPSWKPLMN

SEQ ID NO: 157 - protein, 764 aa, Homo sapiens
MGSNLSPQLCLMPFILGLLSGGVTTTPWSLARPQGSCSLEGVEIKGGSFRLLQEGQALEYVCPSGFYPYPVQTRTCRSTGSWSTLKTQDQKTVRKAECRAIHCPRPHDFENGEYWPRSPYYNVSDEISFHCYDGYTLRGSANRTCQVNGRWSGQTAICDNGAGYCSNPGIPIGTRKVGSQYRLEDSVTYHCSRGLTLRGSQRRTCQEGGSWSGTEPSCQDSFMYDTPQEVAEAFLSSLTETIEGVDAEDGHGPGEQQKRKIVLDPSGSMNIYLVLDGSDSIGASNFTGAKKCLVNLIEKVASYGVKPRYGLVTYATYPKIWVKVSEADSSNADWVTKQLNEINYEDHKLKSGTNTKKALQAVYSMMSWPDDVPPEGWNRTRHVIILMTDGLHNMGGDPITVIDEIRDLLYIGKDRKNPREDYLDVYVFGVGPLVNQVNINALASKKDNEQHVFKVKDMENLEDVFYQMIDESQSLSLCGMVWEHRKGTDYHKQPWQAKISVIRPSKGHESCMGAVVSEYFVLTAAHCFTVDDKEHSIKVSVGGEKRDLEIEVVLFHPNYNINGKKEAGIPEFYDYDVALIKLKNKLKYGQTIRPICLPCTEGTTRALRLPPTTTCQQQKEELLPAQDIKALFVSEEEKKLTRKEVYIKNGDKKGSCERDAQYAPGYDKVKDISEVVTPRFLCTGGVSPYADPNTCRGDSGGPLIVHKRSRFIQVGVISWGVVDVCKNQKRQKQVPAHARDFHINLFQVLPWLKEKLQDEDLGFL

SEQ ID NO: 158 - protein, 1685 aa, Homo sapiens
MKLRGVSLAAGLFLLALSLWGQPAEAAACYGCSPGSKCDCSGIKGEKGERGFPGLEGHPGLPGFPGPEGPPGPRGQKGDDGIPGPPGPKGIRGPPGLPGFPGTPGLPGMPGHDGAPGPQGIPGCNGTKGERGFPGSPGFPGLQGPPGPPGIPGMKGEPGSIIMSSLPGPKGNPGYPGPPGIQGLPGPTGIPGPIGPPGPPGLMGPPGPPGLPGPKGNMGLNFQGPKGEKGEQGLQGPPGPPGQISEQKRPIDVEFQKGDQGLPGDRGPPGPPGIRGPPGPPGGEKGEKGEQGEPGKRGKPGKDGENGQPGIPGLPGDPGYPGEPGRDGEKGQKGDTGPPGPPGLVIPRPGTGITIGEKGNIGLPGLPGEKGERGFPGIQGPPGLPGPPGAAVMGPPGPPGFPGERGQKGDEGPPGISIPGPPGLDGQPGAPGLPGPPGPAGPHIPPSDEICEPGPPGPPGSPGDKGLQGEQGVKGDKGDTCFNCIGTGISGPPGQPGLPGLPGPPGSLGFPGQKGEKGQAGATGPKGLPGIPGAPGAPGFPGSKGEPGDILTFPGMKGDKGELGSPGAPGLPGLPGTPGQDGLPGLPGPKGEPGGITFKGERGPPGNPGLPGLPGNIGPMGPPGFGPPGPVGEKGIQGVAGNPGQPGIPGPKGDPGQTITQPGKPGLPGNPGRDGDVGLPGDPGLPGQPGLPGIPGSKGEPGIPGIGLPGPPGPKGFPGIPGPPGAPGTPGRIGLEGPPGPPGFPGPKGEPGFALPGPPGPPGLPGFKGALGPKGDRGFPGPPGPPGRTGLDGLPGPKGDVGPNGQPGPMGPPGLPGIGVQGPPGPPGIPGPIGQPGLHGIPGEKGDPGPPGLDVPGPPGERGSPGIPGAPGPIGPPGSPGLPGKAGASGFPGTKGEMGMMGPPGPPGPLGIPGRSGVPGLKGDDGLQGQPGLPGPTGEKGSKGEPGLPGPPGPMDPNLLGSKGEKGEPGLPGIPGVSGPKGYQGLPGDPGQPGLSGQPGLPGPPGPKGNPGLPGQPGLIGPPGLKGTIGDMGFPGPQGVEGPPGPSGVPGQPGSPGLPGQKGDKGDPGISSIGLPGLPGPKGEPGLPGYPGNPGIKGSVGDPGLPGLPGTPGAKGQPGLPGFPGTPGPPGPKGISGPPGNPGLPGEPGPVGGGGHPGQPGPPGEKGKPGQDGIPGPAGQKGEPGQPGFGNPGPPGLPGLSGQKGDGGLPGIPGNPGLPGPKGEPGFHGFPGVQGPPGPPGSPGPALEGPKGNPGPQGPPGRPGLPGPEGPPGLPGNGGIKGEKGNPGQPGLPGLPGLKGDQGPPGLQGNPGRPGLNGMKGDPGLPGVPGFPGMKGPSGVPGSAGPEGEPGLIGPPGPPGLPGPSGQSIIIKGDAGPPGIPGQPGLKGLPGPQGPQGLPGPTGPPGDPGRNGLPGFDGAGGRKGDPGLPGQPGTRGLDGPPGPDGLQGPPGPPGTSSVAHGFLITRHSQTTDAPQCPQGTLQVYEGFSLLYVQGNKRAHGQDLGTAGSCLRRFSTMPFMFCNINNVCNFASRNDYSYWLSTPEPMPMSMQPLKGQSIQPFISRCAVCEAPAVVIAVHSQTIQIPHCPQGWDSLWIGYSFMMHTSAGAEGSGQALASPGSCLEEFRSAPFIECHGRGTCNYYANSYSFWLATVDVSDMFSKPQSETLKAGDLRTRISRCQVCMKRT

SEQ ID NO: 159 - protein, 824 aa, Homo sapiens
MSAPSEEEEYARLVMEAQPEWLRAEVKRLSHELAETTREKIQAAEYGLAVLEEKHQLKLQFEELEVDYEAIRSEMEQLKEAFGQAHTNHKKVAADGESREESLIQESASKEQYYVRKVLELQTELKQLRNVLTNTQSENERLASVAQELKEINQNVEIQRGRLRDDIKEYKFREARLLQDYSELEEENISLQKQVSVLRQNQVEFEGLKHEIKRLEEETEYLNSQLEDAIRLKEISERQLEEALETLKTEREQKNSLRKELSHYMSINDSFYTSHLHVSLDGLKFSDDAAEPNNDAEALVNGFEHGGLAKLPLDNKTSTPKKEGLAPPSPSLVSDLLSELNISEIQKLKQQLMQMEREKAGLLATLQDTQKQLEHTRGSLSEQQEKVTRLTENLSALRRLQASKERQTALDNEKDRDSHEDGDYYEVDINGPEILACKYHVAVAEAGELREQLKALRSTHEAREAQHAEEKGRYEAEGQALTEKVSLLEKASRQDRELLARLEKELKKVSDVAGETQGSLSVAQDELVTFSEELANLYHHVCMCNNETPNRVMLDYYREGQGGAGRTSPGGRTSPEARGRRSPILLPKGLLAPEAGRADGGTGDSSPSPGSSLPSPLSDPRREPMNIYNLIAIIRDQIKHLQAAVDRTTELSRQRIASQELGPAVDKDKEALMEEILKLKSLLSTKREQITTLRTVLKANKQTAEVALANLKSKYENEKAMVTETMMKLRNELKALKEDAATFSSLRAMFATRCDEYITQLDEMQRQLAAAEDEKKTLNSLLRMAIQQKLALTQRLELLELDHEQTRRGRAKAAPKTKPATPSL

SEQ ID NO: 160 - protein, 720 aa, Homo sapiens
MSEGAAAASPPGAASAAAASAEEGTAAAAAAAAAGGGPDGGGEGAAEPPRELRCSDCIVWNRQQTWLCVVPLFIGFIGLGLSLMLLKWIVVGSVKEYVPTDLVDSKGMGQDPFFLSKPSSFPKAMETTTTTTSTTSPATPSAGGAASSRTPNRISTRLTTITRAPTRFPGHRVPIRASPRSTTARNTAAPATVPSTTAPFFSSSTLGSRPPVPGTPSTQAMPSWPTAAYATSSYLHDSTPSWTLSPFQDAASSSSSSSSSATTTTPETSTSPKFHTTTYSTERSEHFKPCRDKDLAYCLNDGECFVIETLTGSHKHCRCKEGYQGVRCDQFLPKTDSILSDPTDHLGIEFMESEEVYQRQVLSISCIIFGIVIVGMFCAAFYFKSKKQAKQIQEQLKVPQNGKSYSLKASSTMAKSENLVKSHVQLQNYSKVERHPVTALEKMMESSFVGPQSFPEVPSPDRGSQSVKHHRSLSSCCSPGQRSGMLHRNAFRRTPPSPRSRLGGIVGPAYQQLEESRIPDQDTIPCQGIEVRKTISHLPIQLWCVERPLDLKYSSSGLKTQRNTSINMQLPSRETNPYFNSLEQKDLVGYSSTRASSVPIIPSVGLEETCLQMPGISEVKSIKWCKNSYSADVVNVSIPVSDCLIAEQQEVKILLETVQEQIRILTDARRSEDYELASVETEDSASENTAFLPLSPTAKSEREAQFVLRNEIQRDSALTK

SEQ ID NO: 161 - protein, 878 aa, Homo sapiens
MATAPSYPAGLPGSPGPGSPPPPGGLELQSPPPLLPQIPAPGSGVSFHIQIGLTREFVLLPAASELAHVKQLACSIVDQKFPECGFYGLYDKILLFKHDPTSANLLQLVRSSGDIQEGDLVEVVLSASATFEDFQIRPHALTVHSYRAPAFCDHCGEMLFGLVRQGLKCDGCGLNYHKRCAFSIPNNCSGARKRRLSSTSLASGHSVRLGTSESLPCTAEELSRSTTELLPRRPPSSSSSSSASSYTGRPIELDKMLLSKVKVPHTFLIHSYTRPTVCQACKKLLKGLFRQGLQCKDCKFNCHKRCATRVPNDCLGEALINGDVPMEEATDFSEADKSALMDESEDSGVIPGSHSENALHASEEEEGEGGKAQSSLGYIPLMRVVQSVRHTTRKSSTTLREGWVVHYSNKDTLRKRHYWRLDCKCITLFQNNTTNRYYKEIPLSEILTVESAQNFSLVPPGTNPHCFEIVTANATYFVGEMPGGTPGGPSGQGAEAARGWETAIRQALMPVILQDAPSAPGHAPHRQASLSISVSNSQIQENVDIATVYQIFPDEVLGSGQFGVVYGGKHRKTGRDVAVKVIDKLRFPTKQESQLRNEVAILQSLRHPGIVNLECMFETPEKVFVVMEKLHGDMLEMILSSEKGRLPERLTKFLITQILVALRHLHFKNIVHCDLKPENVLLASADPFPQVKLCDFGFARIIGEKSFRRSVVGTPAYLAPEVLLNQGYNRSLDMWSVGVIMYVSLSGTFPFNEDEDINDQIQNAAFMYPASPWSHISAGAIDLINNLLQVKMRKRYSVDKSLSHPWLQEYQTWLDLRELEGKMGERYITHESDDARWEQFAAEHPLPGSGLPTDRDLGGACPPQDHDMQGLAERISVL

SEQ ID NO: 162 - protein, 534 aa, Homo sapiens
MFSWVSKDARRKKEPELFQTVAEGLRQLYAQKLLPLEEHYRFHEFHSPALEDADFDNKPMVLLVGQYSTGKTTFIRHLIEQDFPGMRIGPEPTTDSFIAVMHGPTEGVVPGNALVVDPRRPFRKLNAFGNAFLNRFMCAQLPNPVLDSISIIDTPGILSGEKQRISRGYDFAAVLEWFAERVDRIILLFDAHKLDISDEFSEVIKALKNHEDKIRVVLNKADQIETQQLMRVYGALMWSLGKIINTPEVVRVYIGSFWSHPLLIPDNRKLFEAEEQDLFKDIQSLPRNAALRKLNDLIKRARLAKVHAYIISSLKKEMPNVFGKESKKKELVNNLGEIYQKIEREHQISPGDFPSLRKMQELLQTQDFSKFQALKPKLLDTVDDMLANDIARLMVMVRQEESLMPSQVVKGGAFDGTMNGPFGHGYGEGAGEGIDDVEWVVGKDKPTYDEIFYTLSPVNGKITGANAKKEMVKSKLPNTVLGKIWKLADVDKDGLLDDEEFALANHLIKVKLEGHELPADLPPHLVPPSKRRHE

SEQ ID NO: 163 - protein, 158 aa, Homo sapiens
MMRFMLLFSRQGKLRLQKWYLATSDKERKKMVRELMQVVLARKPKMCSFLEWRDLKVVYKRYASLYFCCAIEGQDNELITLELIHRYVELLDKYFGSVCELDIIFNFEKAYFILDEFLMGGDVQDTSKKSVLKAIEQADLLQEEDESPRSVLEEMGLA

SEQ ID NO: 164 - protein, 279 aa, Homo sapiens
MTKNEKKSLNQSLAEWKLFIYNPTTGEFLGRTAKSWGLILLFYLVFYGFLAALFSFTMWVMLQTLNDEVPKYRDQIPSPGLMVFPKPVTALEYTFSRSDPTSYAGYIEDLKKFLKPYTLEEQKNLTVCPDGALFEQKGPVYVACQFPISLLQACSGMNDPDFGYSQGNPCILVKMNRIIGLKPEGVPRIDCVSKNEDIPNVAVYPHNGMIDLKYFPYYGKKLHVGYLQPLVAVQVSFAPNNTGKEVTVECKIDGSANLKSQDDRDKFLGRVMFKITARA

SEQ ID NO: 165 - protein, 609 aa, Homo sapiens
MSGWESYYKTEGDEEAEEEQEENLEASGDYKYSGRDSLIFLVDASKAMFESQSEDELTPFDMSIQCIQSVYISKIISSDRDLLAVVFYGTEKDKNSVNFKNIYVLQELDNPGAKRILELDQFKGQQGQKRFQDMMGHGSDYSLSEVLWVCANLFSDVQFKMSHKRIMLFTNEDNPHGNDSAKASRARTKAGDLRDTGIFLDLMHLKKPGGFDISLFYRDIISIAEDEDLRVHFEESSKLEDLLRKVRAKETRKRALSRLKLKLNKDIVISVGIYNLVQKALKPPPIKLYRETNEPVKTKTRTFNTSTGGLLLPSDTKRSQIYGSRQIILEKEETEELKRFDDPGLMLMGFKPLVLLKKHHYLRPSLFVYPEESLVIGSSTLFSALLIKCLEKEVAALCRYTPRRNIPPYFVALVPQEEELDDQKIQVTPPGFQLVFLPFADDKRKMPFTEKIMATPEQVGKMKAIVEKLRFTYRSDSFENPVLQQHFRNLEALALDLMEPEQAVDLTLPKVEAMNKRLGSLVDEFKELVYPPDYNPEGKVTKRKHDNEGSGSKRPKVEYSEEELKTHISKGTLGKFTVPMLKEACRAYGLKSGLKKQELLEALTKHFQD

SEQ ID NO: 166 - protein, 732 aa, Homo sapiens; identical to SEQ ID NO: 31

SEQ ID NO: 167 - protein, 148 aa, Homo sapiens
MKALIVLGLVLLSVTVQGKVFERCELARTLKRLGMDGYRGISLANWMCLAKWESGYNTRATNYNAGDRSTDYGIFQINSRYWCNDGKTPGAVNACHLSCSALLQDNIADAVACAKRVVRDPQGIRAWVAWRNRCQNRDVRQYVQGCGV

SEQ ID NO: 168 - protein, 148 aa, Homo sapiens; identical to SEQ ID NO: 167

SEQ ID NO: 169 - protein, 764 aa, Homo sapiens
MNGEADCPTDLEMAAPKGQDRWSQEDMLTLLECMKNNLPSNDSSKFKTTESHMDWEKVAFKDFSGDMCKLKWVEISNEVRKFRTLTELILDAQEHVKNPYKGKKLKKHPDFPKKPLTPYFRFFMEKRAKYAKLHPEMSNLDLTKILSKKYKELPEKKKMKYIQDFQREKQEFERNLARFREDHPDLIQNAKKSDIPEKPKTPQQLWYTHEKKVYLKVRPDATTKEVKDSLGKQWSQLSDKKRLKWIHKALEQRKEYEEIMRDYIQKHPELNISEEGITKSTLTKAERQLKDKFDGRPTKPPPNSYSLYCAELMANMKDVPSTERMVLCSQQWKLLSQKEKDAYHKKCDQKKKDYEVELLRFLESLPEEEQQRVLGEEKMLNINKKQATSPASKKPAQEGGKGGSEKPKRPVSAMFIFSEEKRRQLQEERPELSESELTRLLARMWNDLSEKKKAKYKAREAALKAQSERKPGGEREERGKLPESPKRAEEIWQQSVIGDYLARFKNDRVKALKAMEMTWNNMEKKEKLMWIKKAAEDQKRYERELSEMRAPPAATNSSKKMKFQGEPKKPPMNGYQKFSQELLSNGELNHLPLKERMVEIGSRWQRISQSQKEHYKKLAEEQQKQYKVHLDLWVKSLSPQDRAAYKEYISNKRKSMTKLRGPNPKSSRTTLQSKSESEEDDEEDEDDEDEDEEEEDDENGDSSEDGGDSSESSSEDESEDGDENEEDDEDEDDDEDDDEDEDNESEGSSSSSSSSGDSSDSDSN

SEQ ID NO: 170 - protein, 664 aa, Homo sapiens
METPSQRRATRSGAQASSTPLSPTRITRLQEKEDLQELNDRLAVYIDRVRSLETENAGLRLRITESEEVVSREVSGIKAAYEAELGDARKTLDSVAKERARLQLELSKVREEFKELKARNTKKEGDLIAAQARLKDLEALLNSKEAALSTALSEKRTLEGELHDLRGQVAKLEAALGEAKKQLQDEMLRRVDAENRLQTMKEELDFQKNIYSEELRETKRRHETRLVEIDNGKQREFESRLADALQELRAQHEDQVEQYKKELEKTYSAKLDNARQSAERNSNLVGAAHEELQQSRIRIDSLSAQLSQLQKQLAAKEAKLRDLEDSLARERDTSRRLLAEKEREMAEMRARMQQQLDEYQELLDIKLALDMEIHAYRKLLEGEEERLRLSPSPTSQRSRGRASSHSSQTQGGGSVTKKRKLESTESRSSFSQHARTSGRVAVEEVDEEGKFVRLRNKSNEDQSMGNWQIKRQNGDDPLLTYRFPPKFTLKAGQVVTIWAAGAGATHSPPTDLVWKAQNTWGCGNSLRTALINSTGEEVAMRKLVRSVTVVEDDEDEDGDDLLHHHHGSHCSSSGDPAEYNLRSRTVLCGTCGQPADKASASGSGAQVGGPISSGSSASSVTVTRSYRSVGGSGGGSFGDNLVTRSYLLGNSSPRTQSPQNCSIM

SEQ ID NO: 171 - protein, 2479 aa, Homo sapiens
MPPNINWKEIMKVDPDDLPRQEELADNLLISLSKVEVNELKSEKQENVIHLFRITQSLMKMKAQEVELALEEVEKAGEEQAKFENQLKTKVMKLENELEMAQQSAGGRDTRFLRNEICQLEKQLEQKDRELEDMEKELEKEKKVNEQLALRNEEAENENSKLRRENKRLKKKNEQLCQDIIDYQKQIDSQKETLLSRRGEDSDYRSQLSKKNYELIQYLDEIQTLTEANEKIEVQNQEMRKNLEESVQEMEKMTDEYNRMKAIVHQTDNVIDQLKKENDHYQLQVQELTDLLKSKNEEDDPIMVAVNAKVEEWKLILSSKDDEIIEYQQMLHNLREKLKNAQLDADKSNVMALQQGIQERDSQIKMLTEQVEQYTKEMEKNTCIIEDLKNELQRNKGASTLSQQTHMKIQSTLDILKEKTKEAERTAELAEADAREKDKELVEALKRLKDYESGVYGLEDAVVEIKNCKNQIKIRDREIEILTKEINKLELKISDFLDENEALRERVGLEPKTMIDLTEFRNSKHLKQQQYRAENQILLKEIESLEEERLDLKKKIRQMAQERGKRSATSGLTTEDLNLTENISQGDRISERKLDLLSLKNMSEAQSKNEFLSRELIEKERDLERSRTVIAKFQNKLKELVEENKQLEEGMKEILQAIKEMQKDPDVKGGETSLIIPSLERLVNAIESKNAEGIFDASLHLKAQVDQLTGRNEELRQELRESRKEAINYSQQLAKANLKIDHLEKETSLLRQSEGSNVVFKGIDLPDGIAPSSASIINSQNEYLIHLLQELENKEKKLKNLEDSLEDYNRKFAVIRHQQSLLYKEYLSEKETWKTESKTIKEEKRKLEDQVQQDAIKVKEYNNLLNALQMDSDEMKKILAENSRKITVLQVNEKSLIRQYTTLVELERQLRKENEKQKNELLSMEAEVCEKIGCLQRFKEMAIFKIAALQKVVDNSVSLSELELANKQYNELTAKYRDILQKDNMLVQRTSNLEHLECENISLKEQVESINKELEITKEKLHTIEQAWEQETKLGNESSMDKAKKSITNSDIVSISKKITMLEMKELNERQRAEHCQKMYEHLRTSLKQMEERNFELETKFAELTKINLDAQKVEQMLRDELADSVSKAVSDADRQRILELEKNEMELKVEVSKLREISDIARRQVEILNAQQQSRDKEVESLRMQLLDYQAQSDEKSLIAKLHQHNVSLQLSEATALGKLESITSKLQKMEAYNLRLEQKLDEKEQALYYARLEGRNRAKHLRQTIQSLRRQFSGALPLAQQEKFSKTMIQLQNDKLKIMQEMKNSQQEHRNMENKTLEMELKLKGLEELISTLKDTKGAQKVINWHMKIEELRLQELKLNRELVKDKEEIKYLNNIISEYERTISSLEEEIVQQNKFHEERQMAWDQREVDLERQLDIFDRQQNEILNAAQKFEEATGSIPDPSLPLPNQLEIALRKIKENIRIILETRATCKSLEEKLKEKESALRLAEQNILSRDKVINELRLRLPATAEREKLIAELGRKEMEPKSHHTLKIAHQTIANMQARLNQKEEVLKKYQRLLEKAREEQREIVKKHEEDLHILHHRLELQADSSLNKFKQTAWDLMKQSPTPVPTNKHFIRLAEMEQTVAEQDDSLSSLLVKLKKVSQDLERQREITELKVKEFENIKLQLQENHEDEVKKVKAEVEDLKYLLDQSQKESQCLKSELQAQKEANSRAPTTTMRNLVERLKSQLALKEKQQKALSRALLELRAEMTAAAEERIISATSQKEAHLNVQQIVDRHTRELKTQVEDLNENLLKLKEALKTSKNRENSLTDNLNDLNNELQKKQKAYNKILREKEEIDQENDELKRQIKRLTSGLQGKPLTDNKQSLIEELQRKVKKLENQLEGKVEEVDLKPMKEKNAKEELIRWEEGKKWQAKIEGIRNKLKEKEGEVFTLTKQLNTLKDLFAKADKEKLTLQRKLKTTGMTVDQVLGIRALESEKELEELKKRNLDLENDILYMRAHQALPRDSVVEDLHLQNRYLQEKLHALEKQFSKDTYSKPSISGIESDDHCQREQELQKENLKLSSENIELKFQLEQANKDLPRLKNQVRDLKEMCEFLKKEKAEVQRKLGHVRGSGRSGKTIPELEKTIGLMKKVVEKVQRENEQLKKASGILTSEKMANIEQENEKLKAELEKLKAHLGHQLSMHYESKTKGTEKIIAENERLRKELKKETDAAEKLRIAKNNLEILNEKMTVQLEETGKRLQFAESRGPQLEGADSKSWKSIVVTRMYETKLKELETDIAKKNQSITDLKQLVKEATEREQKVNKYNEDLEQQIKILKHVPEGAETEQGLKRELQVLRLANHQLDKEKAELIHQIEANKDQSGAESTIPDADQLKEKIKDLETQLKMSDLEKQHLKEEIKKLKKELENFDPSFFEEIEDLKYNYKEEVKKNILLEEKVKKLSEQLGVELTSPVAASEEFEDEEESPVNFPIY

SEQ ID NO: 172 - protein, 576 aa, Homo sapiens
MELENIVANTVLLKAREGGGGNRKGKSKKWRQMLQFPHISQCEELRLSLERDYHSLCERQPIGRLLFREFCATRPELSRCVAFLDGVAEYEVTPDDKRKACGRQLTQNFLSHTGPDLIPEVPRQLVTNCTQRLEQGPCKDLFQELTRLTHEYLSVAPFADYLDSIYFNRFLQWKWLERQPVTKNTFRQYRVLGKGGFGEVCACQVRATGKMYACKKLEKKRIKKRKGEAMALNEKQILEKVNSRFVVSLAYAYETKDALCLVLTLMNGGDLKFHIYHMGQAGFPEARAVFYAAEICCGLEDLHRERIVYRDLKPENILLDDHGHIRISDLGLAVHVPEGQTIKGRVGTVGYMAPEVVKNERYTFSPDWWALGCLLYEMIAGQSPFQQRKKKIKREEVERLVKEVPEEYSERFSPQARSLCSQLLCKDPAERLGCRGGSAREVKEHPLFKKLNFKRLGAGMLEPPFKPDPQAIYCKDVLDIEQFSTVKGVELEPTDQDFYQKFATGSVPIPWQNEMVETECFQELNVFGLDGSVPPDLDWKGQPPAPPKKGLLQRLFSRQDCCGNCSDSEEELPTRL

SEQ ID NO: 173 - protein, 288 aa, Homo sapiens
MSDSGEQNYGERESRSASRSGSAHGSGKSARHTPARSRSKEDSRRSRSKSRSRSESRSRSRRSSRRHYTRSRSRSRSHRRSRSRSYSRDYRRRHSHSHSPMSTRRRHVGNRANPDPNCCLGVFGLSLYTTERDLREVFSKYGPIADVSIVYDQQSRRSRGFAFVYFENVDDAKEAKERANGMELDGRRIRVDFSITKRPHTPTPGIYMGRPTYGSSRRRDYYDRGYDRGYDDRDYYSRSYRGGGGGGGGWRAAQDRDQIYRRRSPSPYYSRGGYRSRSRSRSYSPRRY

SEQ ID NO: 174 - protein, 656 aa, Homo sapiens
MEGDGSDPEPPDAGEDSKSENGENAPIYCICRKPDINCFMIGCDNCNEWFHGDCIRITEKMAKAIREWYCRECREKDPKLEIRYRHKKSRERDGNERDSSEPRDEGGGRKRPVPDPDLQRRAGSGTGVGAMLARGSASPHKSSPQPLVATPSQHHQQQQQQIKRSARMCGECEACRRTEDCGHCDFCRDMKKFGGPNKIRQKCRLRQCQLRARESYKYFPSSLSPVTPSESLPRPRRPLPTQQQPQPSQKLGRIREDEGAVASSTVKEPPEATATPEPLSDEDLPLDPDLYQDFCAGAFDDHGLPWMSDTEESPFLDPALRKRAVKVKHVKRREKKSEKKKEERYKRHRQKQKHKDKWKHPERADAKDPASLPQCLGPGCVRPAQPSSKYCSDDCGMKLAANRIYEILPQRIQQWQQSPCIAEEHGKKLLERIRREQQSARTRLQEMERRFHELEAIILRAKQQAVREDEESNEGDSDDTDLQIFCVSCGHPINPRVALRHMERCYAKYESQTSFGSMYPTRIEGATRLFCDVYNPQSKTYCKRLQVLCPEHSRDPKVPADEVCGCPLVRDVFELTGDFCRLPKRQCNRHYCWEKLRRAEVDLERVRVWYKLDELFEQERNVRTAMTNRAGLLALMLHQTIQHDPLTTDLRSSADR

SEQ ID NO: 175 - protein, 215 aa, Homo sapiens
MGKGDPKKPRGKMSSYAFFVQTCREEHKKKHPDASVNFSEFSKKCSERWKTMSAKEKGKFEDMAKADKARYEREMKTYIPPKGETKKKFKDPNAPKRPPSAFFLFCSEYRPKIKGEHPGLSIGDVAKKLGEMWNNTAADDKQPYEKKAAKLKEKYEKDIAAYRAKGKPDAAKKGVVKAEKSKKKKEEEEDEEDEEDEEEEEDEEDEDEEEDDDDE

SEQ ID NO: 176 - protein, 286 aa, Homo sapiens
MAEDGEEAEFHFAALYISGQWPRLRADTDLQRLGSSAMAPSRKFFVGGNWKMNGRKQSLGELIGTLNAAKVPADTEVVCAPPTAYIDFARQKLDPKIAVAAQNCYKVTNGAFTGEISPGMIKDCGATWVVLGHSERRHVFGESDELIGQKVAHALAEGLGVIACIGEKLDEREAGITEKVVFEQTKVIADNVKDWSKVVLAYEPVWAIGTGKTATPQQAQEVHEKLRGWLKSNVSDAVAQSTRIIYGGSVTGATCKELASQPDVDGFLVGGASLKPEFVDIINAKQ

SEQ ID NO: 177 - protein, 2479 aa, Homo sapiens; identical to SEQ ID NO: 171

SEQ ID NO: 178 - protein, 668 aa, Homo sapiens
MELEVPDEAESAEAGAVPSEAAWAAESGAAAGLAQKKAAPTEVLSMTAQPGPGHGKKLGHRGVDASGETTYKKTTSSTLKGAIQLGIGYTVGHLSSKPERDVLMQDFYVVESIFFPSEGSNLTPAHHFQDFRFKTYAPVAFRYFRELFGIRPDDYLYSLCNEPLIELSNPGASGSLFYVTSDDEFIIKTVMHKEAEFLQKLLPGYYMNLNQNPRTLLPKFYGLYCVQSGGKNIRVVVMNNILPRVVKMHLKFDLKGSTYKRRASKKEKEKSFPTYKDLDFMQDMPEGLLLDADTFSALVKTLQRDCLVLESFKIMDYSLLLGVHNIDQHERERQAQGAQSTSDEKRPVGQKALYSTAMESIQGGAARGEAIESDDTMGGIPAVNGRGERLLLHIGIIDILQSYRFIKKLEHTWKALVHDGDTVSVHRPSFYAERFFKFMSNTVFRKNSSLKSSPSKKGRGGALLAVKPLGPTAAFSASQIPSEREEAQYDLRGARSYPTLEDEGRPDLLPCTPPSFEEATTASIATTLSSTSLSIPERSPSETSEQPRYRRRTQSSGQDGRPQEEPPAEEDLQQITVQVEPACSVEIVVPKEEDAGVEASPAGASAAVEVETASQASDEEGAPASQASDEEDAPATDIYFPTDERSWVYSPLHYSAQAPPASDGESDT

SEQ ID NO: 179 - protein, 430 aa, Homo sapiens
MSFTTRSTFSTNYRSLGSVQAPSYGARPVSSAASVYAGAGGSGSRISVSRSTSFRGGMGSGGLATGIAGGLAGMGGIQNEKETMQSLNDRLASYLDRVRSLETENRRLESKIREHLEKKGPQVRDWSHYFKIIEDLRAQIFANTVDNARIVLQIDNARLAADDFRVKYETELAMRQSVENDIHGLRKVIDDTNITRLQLETEIEALKEELLFMKKNHEEEVKGLQAQIASSGLTVEVDAPKSQDLAKIMADIRAQYDELARKNREELDKYWSQQIEESTTVVTTQSAEVGAAETTLTELRRTVQSLEIDLDSMRNLKASLENSLREVEARYALQMEQLNGILLHLESELAQTRAEGQRQAQEYEALLNIKVKLEAEIATYRRLLEDGEDFNLGDALDSSNSMQTIQKTTTRRIVDGKVVSETNDTKVLRH

SEQ ID NO: 180 - protein, 858 aa, Homo sapiens
MVNFTVDQIRAIMDKKANIRNMSVIAHVDHGKSTLTDSLVCKAGIIASARAGETRFTDTRKDEQERCITIKSTAISLFYELSENDLNFIKQSKDGAGFLINLIDSPGHVDFSSEVTAALRVTDGALVVVDCVSGVCVQTETVLRQAIAERIKPVLMMNKMDRALLELQLEPEELYQTFQRIVENVNVIISTYGEGESGPMGNIMIDPVLGTVGFGSGLHGWAFTLKQFAEMYVAKFAAKGEGQLGPAERAKKVEDMMKKLWGDRYFDPANGKFSKSATSPEGKKLPRTFCQLILDPIFKVFDAIMNFKKEETAKLIEKLDIKLDSEDKDKEGKPLLKAVMRRWLPAGDALLQMITIHLPSPVTAQKYRCELLYEGPPDDEAAMGIKSCDPKGPLMMYISKMVPTSDKGRFYAFGRVFSGLVSTGLKVRIMGPNYTPGKKEDLYLKPIQRTILMMGRYVEPIEDVPCGNIVGLVGVDQFLVKTGTITTFEHAHNMRVMKFSVSPVVRVAVEAKNPADLPKLVEGLKRLAKSDPMVQCIIEESGEHIIAGAGELHLEICLKDLEEDHACIPIKKSDPVVSYRETVSEESNVLCLSKSPNKHNRLYMKARPFPDGLAEDIDKGEVSARQELKQRARYLAEKYEWDVAEARKIWCFGPDGTGPNILTDITKGVQYLNEIKDSVVAGFQWATKEGALCEENMRGVRFDVHDVTLHADAIHRGGGQIIPTARRCLYASVLTAQPRLMEPIYLVEIQCPEQVVGGIYGVLNRKRGHVFEESQVAGTPMFVVKAYLPVNESFGFTADLRSNTGGQAFPQCVFDHWQILPGDPFDNSSRPSQVVAETRKRKGLKEGIPALDNFLDKL

SEQ ID NO: 181 - protein, 1083 aa, Homo sapiens
MKGTRAIGSVPERSPAGVDLSLTGLPPPVSRRPGSAATTKPIVRSVSVVTGSEQKRKVLEATGPGGSQAINNLRRSNSTTQVSQPRSGSPRPTEPTDFLMLFEGSPSGKKRPASLSTAPSEKGATWNVLDDQPRGFTLPSNARSSSALDSPAGPRRKECTVALAPNFTANNRSNKGAVGNCVTTMVHNRYTPSERAPPLKSSNQTAPSLNNIIKAATCEGSESSGFGKLPKNVSSATHSARNNTGGSTGLPRRKEVTEEEAERFIHQVNQATVTIQRWYRHQVQRRGAGAARLEHLLQAKREEQRQRSGEGTLLDLHQQKEAARRKAREEKARQARRAAIQELQQKRALRAQKASTAERGPPENPRETRVPGMRQPAQELSPTPGGTAHQALKANNTGGGLPAAGPGDRCLPTSDSSPEPQQPPEDRTQDVLAQDAAGDNLEMMAPSRGSAKSRGPLEELLHTLQLLEKEPDVLPRPRTHHRGRYAWASEVTTEDDASSLTADNLEKFGKLSAFPEPPEDGTLLSEAKLQSIMSFLDEMEKSGQDQLDSQQEGWVPEAGPGPLELGSEVSTSVMRLKLEVEEKKQAMLLLQRALAQQRDLTARRVKETEKALSRQLQRQREHYEATIQRHLAFIDQLIEDKKVLSEKCEAVVAELKQEDQRCTERVAQAQAQHELEIKKLKELMSATEKARREKWISEKTKKIKEVTVRGLEPEIQKLIARHKQEVRRLKSLHEAELLQSDERASQRCLRQAEELREQLEREKEALGQQERERARQRFQQHLEQEQWALQQQRQRLYSEVAEERERLGQQAARQRAELEELRQQLEESSSALTRALRAEFEKGREEQERRHQMELNTLKQQLELERQAWEAGRTRKEEAWLLNREQELREEIRKGRDKEIELVIHRLEADMALAKEESEKAAESRIKRLRDKYEAELSELEQSERKLQERCSELKGQLGEAEGENLRLQGLVRQKERALEDAQAVNEQLSSERSNLAQVIRQEFEDRLAASEEETRQAKAELATLQARQQLELEEVHRRVKTALARKEEAVSSLRTQHEAAVKRADHLEELLEQHRRPTPSTK

SEQ ID NO: 182 - protein, 551 aa, Homo sapiens
MISPDPRPSPGLARWAESYEAKCERRQEIRESRRCRPNVTTCRQVGKTLRIQQREQLQRARLQQFFRRRNLELEEKGKAQHPQAREQGPSRRPGQVTVLKEPLSCARRISSPREQVTGTSSEVFPAQHPPPSGICRDLSDHLSSQAGGLPPQDTPIKKPPKHHRGTQTKAEGPTIKNDASQQTNYGVAVLDKEIIQLSDYLKEALQRELVLKQKMVILQDLLSTLIQASDSSWKGQLNEDKLKGKLRSLENQLYTCTQKYSPWGMKKVLLEMEDQKNSYEQKAKESLQKVLEEKMNAEQQLQSTQRSLALAEQKCEEWRSQYEALKEDWRTLGTQHRELESQLHVLQSKLQGADSRDLQMNQALRFLENEHQQLQAKIECLQGDRDLCSLDTQDLQDQLKRSEAEKLTLVTRVQQLQGLLQNQSLQLQEQEKLLTKKDQALPVWSPKSFPNEVEPEGTGKEKDWDLRDQLQKKTLQLQAKEKECRELHSELDNLSDEYLSCLRKLQHCREELNQSQQLPPRRQCGRWLPVLMVVIAAALAVFLANKDNLMI

SEQ ID NO: 183 - protein, 745 aa, Homo sapiens
MEVMNLMEQPIKVTEWQQTYTYDSGIHSGANTCVPSVSSKGIMEEDEACGRQYTLKKTTTYTQGVPPSQGDLEYQMSTTARAKRVREAMCPGVSGEDSSLLLATQVEGQATNLQRLAEPSQLLKSAIVHLINYQDDAELATRALPELTKLLNDEDPVVVTKAAMIVNQLSKKEASRRALMGSPQLVAAVVRTMQNTSDLDTARCTTSILHNLSHHREGLLAIFKSGGIPALVRMLSSPVESVLFYAITTLHNLLLYQEGAKMAVRLADGLQKMVPLLNKNNPKFLAITTDCLQLLAYGNQESKLIILANGGPQALVQIMRNYSYEKLLWTTSRVLKVLSVCPSNKPAIVEAGGMQALGKHLTSNSPRLVQNCLWTLRNLSDVATKQEGLESVLKILVNQLSVDDVNVLTCATGTLSNLTCNNSKNKTLVTQNSGVEALIHAILRAGDKDDITEPAVCALRHLTSRHPEAEMAQNSVRLNYGIPAIVKLLNQPNQWPLVKATIGLIRNLALCPANHAPLQEAAVIPRLVQLLVKAHQDAQRHVAAGTQQPYTDGVRMEEIVEGCTGALHILARDPMNRMEIFRLNTIPLFVQLLYSSVENIQRVAAGVLCELAQDKEAADAIDAEGASAPLMELLHSRNEGTATYAAAVLFRISEDKNPDYRKRVSVELTNSLFKHDPAAWEAAQSMIPINEPYGDDMDATYRPMYSSDVPLDPLEMHMDMDGDYPIDTYSDGLRPPYPTADHMLA

SEQ ID NO: 184 - protein, 563 aa, Homo sapiens
MFSRNHRSRVTVARGSALEMEFKRGRFRLSLFSDLPEDTELQRKLDHEIRMREGACKLLAACSQREQALEATKSLLVCNSRILSYMGELQRRKEAQVLGKTSRRPSDSGPPAERSPCRGRVCISDLRIPLMWKDTEYFKNKGDLHRWAVFLLLQLGEHIQDTEMILVDRTLTDISFQSNVLFAEAGPDFELRLELYGACVEEEGALTGGPKRLATKLSSSLGRSSGRRVRASLDSAGGSGSSPILLPTPVVGGPRYHLLAHTTLTLAAVQDGFRTHDLTLASHEENPAWLPLYGSVCCRLAAQPLCMTQPTASGTLRVQQAGEMQNWAQVHGVLKGTNLFCYRQPEDADTGEEPLLTIAVNKETRVRAGELDQALGRPFTLSISNQYGDDEVTHTLQTESREALQSWMEALWQLFFDMSQWKQCCDEIMKIETPAPRKPPQALAKQGSLYHEMAIEPLDDIAAVTDILTQREGARLETPPPWLAMFTDQPALPNPCSPASVAPAPDWTHPLPWGRPRTFSLDAVPPDHSPRARSVAPLPPQRSPRTRGLCSKGQPRTWLQSPV

SEQ ID NO: 185 - protein, 519 aa, Homo sapiens
MDAVLEPFPADRLFPGSSFLDLGDLNESDFLNNAHFPEHLDHFTENMEDFSNDLFSSFFDDPVLDEKSPLLDMELDSPTPGIQAEHSYSLSGDSAPQSPLVPIKMEDTTQDAEHGAWALGHKLCSIMVKQEQSPELPVDPLAAPSAMAAAAAMATTPLLGLSPLSRLPIPHQAPGEMTQLPVIKAEPLEVNQFLKVTPEDLVQMPPTPPSSHGSDSDGSQSPRSLPPSSPVRPMARSSTAISTSPLLTAPHKLQGTSGPLLLTEEEKRTLIAEGYPIPTKLPLTKAEEKALKRVRRKIKNKISAQESRRKKKEYVECLEKKVETFTSENNELWKKVETLENANRTLLQQLQKLQTLVTNKISRPYKMAATQTGTCLMVAALCFVLVLGSLVPCLPEFSSGSQTVKEDPLAADGVYTASQMPSRSLLFYDDGAGLWEDGRSTLLPMEPPDGWEINPGGPAEQRPRDHLQHDHLDSTHETTKYLSEAWPKDGGNGTSPDFSHSKEWFHDRDLGPNTTIKLS

SEQ ID NO: 186 - protein, 256 aa, Homo sapiens
MAHRPPSPALASVLLALLLSGAARAAEIVGGHEAQPHSRPYMASLQMRGNPGSHFCGGTLIHPSFVLTAAHCLRDIPQRLVNVVLGAHNVRTQEPTQQHFSVAQVFLNNYDAENKLNDVLLIQLSSPANLSASVATVQLPQQDQPVPHGTQCLAMGWGRVGAHDPPAQVLQELNVTVVTFFCRPHNICTFVPRRKAGICFGDSGGPLICDGIIQGIDSFVIWGCATRLFPDFFTRVALYVDWIRSTLRRVEAKGRP

SEQ ID NO: 187 - protein, 354 aa, Homo sapiens
MRARPQVCEALLFALALQTGVCYGIKWLALSKTPSALALNQTQHCKQLEGLVSAQVQLCRSNLELMHTVVHAAREVMKACRRAFADMRWNCSSIELAPNYLLDLERGTRESAFVYALSAAAISHAIARACTSGDLPGCSCGPVPGEPPGPGNRWGGCADNLSYGLLMGAKFSDAPMKVKKTGSQANKLMRLHNSEVGRQALRASLEMKCKCHGVSGSCSIRTCWKGLQELQDVAADLKTRYLSATKVVHRPMGTRKHLVPKDLDIRPVKDSELVYLQSSPDFCMKNEKVGSHGTQDRQCNKTSNGSDSCDLMCCGRGYNPYTDRVVERCHCKYHWCCYVTCRRCERTVERYVCK

SEQ ID NO: 188 - protein, 347 aa, Homo sapiens
MALLFSLILAICTRPGFLASPSGVRLVGGLHRCEGRVEVEQKGQWGTVCDDGWDIKDVAVLCRELGCGAASGTPSGILYEPPAEKEQKVLIQSVSCTGTEDTLAQCEQEEVYDCSHDEDAGASCENPESSFSPVPEGVRLADGPGHCKGRVEVKHQNQWYTVCQTGWSLRAAKVVCRQLGCGRAVLTQKRCNKHAYGRKPIWLSQMSCSGREATLQDCPSGPWGKNTCNHDEDTWVECEDPFDLRLVGGDNLCSGRLEVLHKGVWGSVCDDNWGEKEDQVVCKQLGCGKSLSPSFRDRKCYGPGVGRIWLDNVRCSGEEQSLEQCQHRFWGFHDCTHQEDVAVICSG

SEQ ID NO: 189 - protein, 829 aa, Homo sapiens
MGLPRGPLASLLLLQVCWLQCAASEPCRAVFREAEVTLEAGGAEQEPGQALGKVFMGCPGQEPALFSTDNDDFTVRNGETVQERRSLKERNPLKIFPSKRILRRHKRDWVVAPISVPENGKGPFPQRLNQLKSNKDRDTKIFYSITGPGADSPPEGVFAVEKETGWLLLNKPLDREEIAKYELFGHAVSENGASVEDPMNISIIVTDQNDHKPKFTQDTFRGSVLEGVLPGTSVMQVTATDEDDAIYTYNGVVAYSIHSQEPKDPHDLMFTIHRSTGTISVISSGLDREKVPEYTLTIQATDMDGDGSTTTAVAVVEILDANDNAPMFDPQKYEAHVPENAVGHEVQRLTVTDLDAPNSPAWRATYLIMGGDDGDHFTITTHPESNQGILTTRKGLDFEAKNQHTLYVEVTNEAPFVLKLPTSTATIVVHVEDVNEAPVFVPPSKVVEVQEGIPTGEPVCVYTAEDPDKENQKISYRILRDPAGWLAMDPDSGQVTAVGTLDREDEQFVRNNIYEVMVLAMDNGSPPTTGTGTLLLTLIDVNDHGPVPEPRQITICNQSPVRQVLNITDKDLSPHTSPFQAQLTDDSDIYWTAEVNEEGDTVVLSLKKFLKQDTYDVHLSLSDHGNKEQLTVIRATVCDCHGHVETCPGPWKGGFILPVLGAVLALLFLLLVLLLLVRKKRKIKEPLLLPEDDTRDNVFYYGEEGGGEEDQDYDITQLHRGLEARPEVVLRNDVAPTIIPTPMYRPRPANPDEIGNFIIENLKAANTDPTAPPYDTLLVFDYEGSGSDAASLSSLTSSASDQDQDYDYLNEWGSRFKKLADMYGGGEDD

SEQ ID NO: 190 - protein, 131 aa, Homo sapiens
MARSLVCLGVIILLSAFSGPGVRGGPMPKLADRKLCADQECSHPISMAVALQDYMAPDCRFLTIHRGQVVYVFSKLKGRGRLFWGGSVQGDYYGDLAARLGYFPSSIVREDQTLKPGKVDVKTDKWDFYCQ

SEQ ID NO: 191 - protein, 314 aa, Homo sapiens
MPLEQRSQHCKPEEGLEARGEALGLVGAQAPATEEQEAASSSSTLVEVTLGEVPAAESPDPPQSPQGASSLPTTMNYPLWSQSYEDSSNQEEEGPSTFPDLESEFQAALSRKVAELVHFLLLKYRAREPVTKAEMLGSVVGNWQYFFPVIFSKASSSLQLVFGIELMEVDPIGHLYIFATCLGLSYDGLLGDNQIMPKAGLLIIVLAIIAREGDCAPEEKIWEELSVLEVFEGREDSILGDPKKLLTQHFVQENYLEYRQVPGSDPACYEFLWGPRALVETSYVKVLHHMVKISGGPHISYPPLHEWVLREGEE

SEQ ID NO: 192 - protein, 274 aa, Homo sapiens
MATTVSTQRGPVYIGELPQDFLRITPTQQQRQVQLDAQAAQQLQYGGAVGTVGRLNITVVQAKLAKNYGMTRMDPYCRLRLGYAVYETPTAHNGAKNPRWNKVIHCTVPPGVDSFYLEIFDERAFSMDDRIAWTHITIPESLRQGKVEDKWYSLSGRQGDDKEGMINLVMSYALLPAAMVMPPQPVVLMPTVYQQGVGYVPITGMPAVCSPGMVPVALPPAAVNAQPRCSEEDLKAIQDMFPNMDQEVIRSVLEAQRGNKDAAINSLLQMGEEP

SEQ ID NO: 193 - protein, 738 aa, Homo sapiens
MQPRWAQGATMWLGVLLTLLLCSSLEGQENSFTINSVDMKSLPDWTVQNGKNLTLQCFADVSTTSHVKPQHQMLFYKDDVLFYNISSMKSTESYFIPEVRIYDSGTYKCTVIVNNKEKTTAEYQVLVEGVPSPRVTLDKKEAIQGGIVRVNCSVPEEKAPIHFTIEKLELNEKMVKLKREKNSRDQNFVILEFPVEEQDRVLSFRCQARIISGIHMQTSESTKSELVTVTESFSTPKFHISPTGMIMEGAQLHIKCTIQVTHLAQEFPEIIIQKDKAIVAHNRHGNKAVYSVMAMVEHSGNYTCKVESSRISKVSSIVVNITELFSKPELESSFTHLDQGERLNLSCSIPGAPPANFTIQKEDTIVSQTQDFTKIASKSDSGTYICTAGIDKVVKKSNTVQIVVCEMLSQPRISYDAQFEVIKGQTIEVRCESISGTLPISYQLLKTSKVLENSTKNSNDPAVFKDNPTEDVEYQCVADNCHSHAKMLSEVLRVKVIAPVDEVQISILSSKVVESGEDIVLQCAVNEGSGPITYKFYREKEGKPFYQMTSNATQAFWTKQKASKEQEGEYYCTAFNRANHASSVPRSKILTVRVILAPWKKGLIAVVIIGVIIALLIIAAKCYFLRKAKAKQMPVEMSRPAVPLLNSNNEKMSDPNMEANSHYGHNDDVRNHAMKPINDNKEPLNSDVQYTEVQVSSAESHKDLGKKDTETVYSEVRKAVPDAVESRYSRTEGSLDGT

SEQ ID NO: 194 - protein, 104 aa, Homo sapiens
MGQCRSANAEDAQEFSDVERAIETLIKNFHQYSVEGGKETLTPSELRDLVTQQLPHLMPSNCGLEEKIANLGSCNDSKLEFRSFWELIGEAAKSVKLERPVRGH

SEQ ID NO: 195 - protein, 1522 aa, Homo sapiens
MSVRLPQSIDRLSSLSSLGDSAPERKSPSHHRQPSDASETTGLVQRCVIIQKDQHGFGFTVSGDRIVLVQSVRPGGAAMKAGVKEGDRIIKVNGTMVTNSSHLEVVKLIKSGAYVALTLLGSSPSSMGISGLQQDPSPAGAPRITSVIPSPPPPPPLPPPQRITGPKPLQDPEVQKHATQILRNMLRQEEKELQDILPLYGDTSQRPSEGRLSLDSQEGDSGLDSGTERFPSLSESLMNRNSVLSDPGLDSPRTSPVIMARVAQHHRRQGSDAAVPSTGDQGVDQSPKPLIIGPEEDYDPGYFNNESDIIFQDLEKLKSRPAHLGVFLRYIFSQADPSPLLFYLCAEVYQQASPKDSRSLGKDIWNIFLEKNAPLRVKIPEMLQAEIDSRLRNSEDARGVLCEAQEAAMPEIQEQIHDYRTKRTLGLGSLYGENDLLDLDGDPLRERQVAEKQLAALGDILSKYEEDRSAPMDFALNTYMSHAGIRLREARPSNTAEKAQSAPDKDKWLPFFPKTKKSSNSKKEKDALEDKKRNPILKYIGKPKSSSQSTFHIPLSPVEVKPGNVRNIIQHFENNQQYDAPEPGTQRLSTGSFPEDLLESDSSRSEIRLGRSESLKGREEMKRSRKAENVPRSRSDVDMDAAAEATRLHQSASSSTSSLSTRSLENPTPPFTPKMGRRSIESPSLGFCTDTLLPHLLEDDLGQLSDLEPEPDAQNWQHTVGKDVVAGLTQREIDRQEVINELFVTEASHLRTLRVLDLIFYQRMKKENLMPREELARLFPNLPELIEIHNSWCEAMKKLREEGPIIKEISDLMLARFDGPAREELQQVAAQFCSYQSIALELIKTKQRKESRFQLFMQEAESHPQCRRLQLRDLIISEMQRLTKYPLLLESIIKHTEGGTSEHEKLCRARDQCREILKYVNEAVKQTENRHRLEGYQKRLDATALERASNPLAAEFKSLDLTTRKMIHEGPLTWRISKDKTLDLHVLLLEDLLVLLQKQDEKLLLKCHSKTAVGSSDSKQTFSPVLKLNAVLIRSVATDKRAFFIICTSKLGPPQIYELVALTSSDKNTWMELLEEAVRNATRHPGAAPMPVHPPPPGPREPAQQGPTPSRVELDDSDVFHGEPEPEELPGGTGSQQRVQGKHQVLLEDPEQEGSAEEEELGVLPCPSTSLDGENRGIRTRNPIHLAFPGPLFMEGLADSALEDVENLRHLILWSLLPGHTMETQAAQEPEDDLTPTPSVISVTSHPWDPGSPGQAPPGGEGDNTQLAGLEGERPEQEDMGLCSLEHLPPRTRNSGIWESPELDRNLAEDASSTEAAGGYKVVRKAEVAGSKVVPALPESGQSEPGPPEVEGGTKATGNCFYVSMPSGPPDSSTDHSEAPMSPPQPDSLPAGQTEPQPQLQGGNDDPRRPSRSPPSLALRDVGMIFHTIEQLTLKLNRLKDMELAHRELLKSLGGESSGGTTPVGSFHTEAARWTDGSLSPPAKEPLASDSRNSHELGPCPEDGSDAPLEDSTADAAASPGP

SEQ ID NO: 196 - protein, 500 aa, Homo sapiens
MATAASNPYLPGNSLLAAGSIVHSDAAGAGGGGGGGGGGGGGGAGGGGGGMQPGSAAVTSGAYRGDPSSVKMVQSDFMQGAMAASNGGHMLSHAHQWVTALPHAAAAAAAAAAAAVEASSPWSGSAVGMAGSPQQPPQPPPPPPQGPDVKGGAGRDDLHAGTALHHRGPPHLGPPPPPPHQGHPGGWGAAAAAAAAAAAAAAAAHLPSMAGGQQPPPQSLLYSQPGGFTVNGMLSAPPGPGGGGGGAGGGAQSLVHPGLVRGDTPELAEHHHHHHHHAHPHPPHPHHAQGPPHHGGGGGGAGPGLNSHDPHSDEDTPTSDDLEQFAKQFKQRRIKLGFTQADVGLALGTLYGNVFSQTTICRFEALQLSFKNMCKLKPLLNKWLEEADSSTGSPTSIDKIAAQGRKRKKRTSIEVSVKGALESHFLKCPKPSAQEITNLADSLQLEKEVVRVWFCNRRQKEKRMTPPGIQQQTPDDVYSQVGTVSADTPPPHHGLQTSVQ

SEQ ID NO: 197 - protein, 268 aa, Homo sapiens
MQREEKQLEASLDALLSQVADLKNSLGSFICKLENEYGRLTWPSVLDSFALLSGQLNTLNKVLKHEKTPLFRNQVIIPLVLSPDRDEDLMRQTEGRVPVFSHEVVPDHLRTKPDPEVEEQEKQLTTDAARIGADAAQKQIQSLNKMCSNLLEKISKEERESESGGLRPNKQTFNPTDTNALVAAVAFGKGLSNWRPSGSSGPGQAGQPGAGTILAGTSGLQQVQMAGAPSQQQPMLSGVQMAQAGQPGKMPSGIKTNIKSASMHPYQR

SEQ ID NO: 198 - protein, 449 aa, Homo sapiens
MMKTLLLFVGLLLTWESGQVLGDQTVSDNELQEMSNQGSKYVNKEIQNAVNGVKQIKTLIEKTNEERKTLLSNLEEAKKKKEDALNETRESETKLKELPGVCNETMMALWEECKPCLKQTCMKFYARVCRSGSGLVGRQLEEFLNQSSPFYFWMNGDRIDSLLENDRQQTHMLDVMQDHFSRASSIIDELFQDRFFTREPQDTYHYLPFSLPHRRPHFFFPKSRIVRSLMPFSPYEPLNFHAMFQPFLEMIHEAQQAMDIHFHSPAFQHPPTEFIREGDDDRTVCREIRHNSTGCLRMKDQCDKCREILSVDCSTNNPSQAKLRRELDESLQVAERLTRKYNELLKSYQWKMLNTSSLLEQLNEQFNWVSRLANLTQGEDQYYLRVTTVASHTSDSDVPSGVTEVVVKLFDSDPITVTVPVEVSRKNPKFMETVAEKALQEYRKKHREE

SEQ ID NO: 199 - protein, 147 aa, Homo sapiens
MASHRLLLLCLAGLVFVSEAGPTGTGESKCPLMVKVLDAVRGSPAINVAVHVFRKAADDTWEPFASGKTSESGELHGLTTEEEFVEGIYKVEIDTKSYWKALGISPFHEHAEVVFTANDSGPRRYTIAALLSPYSYSTTAVVTNPKE

SEQ ID NO: 200 - protein, 492 aa, Homo sapiens
MEPEAPDSRKRPLETPPEVVCTKRSNTGEEGEYFLKVLIPSYAAGSIIGKGGQTIVQLQKETGATIKLSKSKDFYPGTTERVCLVQGTAEALNAVHSFIAEKVREIPQAMTKPEVVNILQPQTTMNPDRAKQAKLIVPNSTAGLIIGKGGATVKAVMEQSGAWVQLSQKPEGINLQERVVTVSGEPEQVHKAVSAIVQKVQEDPQSSSCLNISYANVAGPVANSNPTGSPYASPADVLPAAAAASAAAASGLLGPAGLAGVGAFPAALPAFSGTDLLAISTALNTLASYGYNTNSLGLGLNSAAASGVLAAVAAGANPAAAAAANLLASYAGEAGAGPAGGAAPPPPPPPGALGSFALAAAANGYLGAGAGGGAGGGGGPLVAAAAAAGAAGGFLTAEKLAAESAKELVEIAVPENLVGAILGKGGKTLVEYQELTGARIQISKKGEFLPGTRNRRVTITGSPAATQAAQYLISQRVTYEQGVRASNPQKVG

SEQ ID NO: 201 - protein, 215 aa, Homo sapiens
MASRGATRPNGPNTGNKICQFKLVLLGESAVGKSSLVLRFVKGQFHEFQESTIGAAFLTQTVCLDDTTVKFEIWDTAGQERYHSLAPMYYRGAQAAIVVYDITNEESFARAKNWVKELQRQASPNIVIALSGNKADLANKRAVDFQEAQSYADDNSLLFMETSAKTSMNVNEIFMAIAKKLPKNEPQNPGANSARGRGVDLTEPTQPTRNQCCSN

SEQ ID NO: 202 - protein, 255 aa, Homo sapiens
MQPLLLLLAFLLPTGAEAGEIIGGRESRPHSRPYMAYLQIQSPAGQSRCGGFLVREDFVLTAAHCWGSNINVTLGAHNIQRRENTQQHITARRAIRHPQYNQRTIQNDIMLLQLSRRVRRNRNVNPVALPRAQEGLRPGTLCTVAGWGRVSMRRGTDTLREVQLRVQRDRQCLRIFGSYDPRRQICVGDRRERKAAFKGDSGGPLLCNNVAHGIVSYGKSSGVPPEVFTRVSSFLPWIRTTMRSFKLLDQMETPL

SEQ ID NO: 203 - protein, 126 aa, Homo sapiens
MSIGVPIKVLHEAEGHIVTCETNTGEVYRGKLIEAEDNMNCQMSNITVTYRDGRVAQLEQVYIRGSKIRFLILPDMLKNAPMLKSMKNKNQGSGAGRGKAAILKAQVAARGRGRGMGRGNIFQKRR

SEQ ID NO: 204 - protein, 378 aa, Homo sapiens
MVDYSVWDHIEVSDDEDETHPNIDTASLFRWRHQARVERMEQFQKEKEELDRGCRECKRKVAECQRKLKELEVAEGGKAELERLQAEAQQLRKEERSWEQKLEEMRKKEKSMPWNVDTLSKDGFSKSMVNTKPEKTEEDSEEVREQKHKTFVEKYEKQIKHFGMLRRWDDSQKYLSDNVHLVCEETANYLVIWCIDLEVEEKCALMEQVAHQTIVMQFILELAKSLKVDPRACFRQFFTKIKTADRQYMEGFNDELEAFKERVRGRAKLRIEKAMKEYEEEERKKRLGPGGLDPVEVYESLPEELQKCFDVKDVQMLQDAISKMDPTDAKYHMQRCIDSGLWVPNSKASEAKEGEEAGPGDPLLEAVPKTGDEKDVSV

SEQ ID NO: 205 - protein, 178 aa, Homo sapiens
MHSSALLCCLVLLTGVRASPGQGTQSENSCTHFPGNLPNMLRDLRDAFSRVKTFFQMKDQLDNLLLKESLLEDFKGYLGCQALSEMIQFYLEEVMPQAENQDPDIKAHVNSLGENLKTLRLRLRRCHRFLPCENKSKAVEQVKNAFNKLQEKGIYKAMSEFDIFINYIEAYMTMKIRN

SEQ ID NO: 206 - protein, 83 aa, Homo sapiens
MSFFQLLMKRKELIPLVVFMTVAAGGASSFAVYSLWKTDVILDRKKNPEPWETVDPTVPQKLITINQQWKPIEELQNVQRVTK

SEQ ID NO: 207 - protein, 266 aa, Homo sapiens
MVCLKLPGGSCMAALTVTLMVLSSPLALAGDTQPRFLWQGKYKCHFFNGTERVQFLERLFYNQEEFVRFDSDVGEYRAVTELGRPVAESWNSQKDILEDRRGQVDTVCRHNYGVGESFTVQRRVHPEVTVYPAKTQPLQHHNLLVCSVSGFYPGSIEVRWFRNGQEEKAGVVSTGLIQNGDWTFQTLVMLETVPRSGEVYTCQVEHPSVMSPLTVEWRARSESAQSKMLSGVGGFVLGLLFLGAGLFIYFRNQKGHSGLQPTGFLS

SEQ ID NO: 208 - protein, 180 aa, Homo sapiens
MQAEGRGTGGSTGDADGPGGPGIPDGPGGNAGGPGEAGATGGRGPRGAGAARASGPGGGAPRGPHGGAASGLNGCCRCGARGPESRLLEFYLAMPFATPMEAELARRSLAQDAPPLPVPGVLLKEFTVSGNILTIRLTAADHRQLQLSISSCLQQLSLLMWITQCFLPVFLAQPPSGQRR

SEQ ID NO: 209 - protein, 180 aa, Homo sapiens; identical to SEQ ID NO: 208

SEQ ID NO: 210 - protein, 115 aa, Homo sapiens
MPMFIVNTNVPRASVPDGFLSELTQQLAQATGKPPQYIAVHVVPDQLMAFGGSSEPCALCSLHSIGKIGGAQNRSYSKLLCGLLAERLRISPDRVYINYYDMNAANVGWNNSTFA

SEQ ID NO: 211 - protein, 921 aa, Homo sapiens
MKTCWKIPVFFFVCSFLEPWASAAVKRRPRFPVNSNSNGGNELCPKIRIGQDDLPGFDLISQFQVDKAASRRAIQRVVGSATLQVAYKLGNNVDFRIPTRNLYPSGLPEEYSFLTTFRMTGSTLKKNWNIWQIQDSSGKEQVGIKINGQTQSVVFSYKGLDGSLQTAAFSNLSSLFDSQWHKIMIGVERSSATLFVDCNRIESLPIKPRGPIDIDGFAVLGKLADNPQVSVPFELQWMLIHCDPLRPRRETCHELPARITPSQTTDERGPPGEQGPPGPPGPPGVPGIDGIDGDRGPKGPPGPPGPAGEPGKPGAPGKPGTPGADGLTGPDGSPGSIGSKGQKGEPGVPGSRGFPGRGIPGPPGPPGTAGLPGELGRVGPVGDPGRRGPPGPPGPPGPRGTIGFHDGDPLCPNACPPGRSGYPGLPGMRGHKGAKGEIGEPGRQGHKGEEGDQGELGEVGAQGPPGAQGLRGITGIVGDKGEKGARGLDGEPGPQGLPGAPGDQGQRGPPGEAGPKGDRGAEGARGIPGLPGPKGDTGLPGVDGRDGIPGMPGTKGEPGKPGPPGDAGLQGLPGVPGIPGAKGVAGEKGSTGAPGKPGQMGNSGKPGQQGPPGEVGPRGPQGLPGSRGELGPVGSPGLPGKLGSLGSPGLPGLPGPPGLPGMKGDRGVVGEPGPKGEQGASGEEGEAGERGELGDIGLPGPKGSAGNPGEPGLRGPEGSRGLPGVEGPRGPPGPRGVQGEQGATGLPGVQGPPGRAPTDQHIKQVCMRVIQEHFAEMAASLKRPDSGATGLPGRPGPPGPPGPPGENGFPGQMGIRGLPGIKGPPGALGLRGPKGDLGEKGERGPPGRGPNGLPGAIGLPGDPGPASYGRNGRDGERGPPGVAGIPGVPGPPGPPGLPGFCEPASCTMQAGQRAFNKGPDP

SEQ ID NO: 212 - protein, 595 aa, Homo sapiens
MVRWFHRDLSGLDAETLLKGRGVHGSFLARPSRKNQGDFSLSVRVGDQVTHIRIQNSGDFYDLYGGEKFATLTELVEYYTQQQGVLQDRDGTIIHLKYPLNCSDPTSERWYHGHMSGGQAETLLQAKGEPWTFLVRESLSQPGDFVLSVLSDQPKAGPGSPLRVTHIKVMCEGGRYTVGGLETFDSLTDLVEHFKKTGIEEASGAFVYLRQPYYATRVNAADIENRVLELNKKQESEDTAKAGFWEEFESLQKQEVKNLHQRLEGQRPENKGKNRYKNILPFDHSRVILQGRDSNIPGSDYINANYIKNQLLGPDENAKTYIASQGCLEATVNDFWQMAWQENSRVIVMTTREVEKGRNKCVPYWPEVGMQRAYGPYSVTNCGEHDTTEYKLRTLQVSPLDNGDLIREIWHYQYLSWPDHGVPSEPGGVLSFLDQINQRQESLPHAGPIIVHCSAGIGRTGTIIVIDMLMENISTKGLDCDIDIQKTIQMVRAQRSGMVQTEAQYKFIYVAIAQFIETTKKKLEVLQSQKGQESEYGNITYPPAMKNAHAKASRTSSKHKEDVYENLHTKNKREEKVKKQRSADKEKSKGSLKRK

SEQ ID NO: 213 - protein, 356 aa, Homo sapiens
MAGVACLGKAADADEWCDSGLGSLGPDAAAPGGPGLGAELGPGLSWAPLVFGYVTEDGDTALHLAVIHQHEPFLDFLLGFSAGTEYMDLQNDLGQTALHLAAILGETSTVEKLYAAGAGLCVAERRGHTALHLACRVGAHACARALLQPRPRRPREAPDTYLAQGPDRTPDTNHTPVALYPDSDLEKEEEESEEDWKLQLEAENYEGHTPLHVAVIHKDVEMVRLLRDAGADLDKPEPTCGRSPLHLAVEAQAADVLELLLRAGANPAARMYGGRTPLGSAMLRPNPILARLLRAHGAPEPEGEDEKSGPCSSSSDSDSGDEGDEYDDIVVHSSRSQTRLPPTPASKPLPDDPRPV

SEQ ID NO: 214 - protein, 758 aa, Homo sapiens
MAEPRQEFEVMEDHAGTYGLGDRKDQGGYTMHQDQEGDTDAGLKESPLQTPTEDGSEEPGSETSDAKSTPTAEDVTAPLVDEGAPGKQAAAQPHTEIPEGTTAEEAGIGDTPSLEDEAAGHVTQEPESGKVVQEGFLREPGPPGLSHQLMSGMPGAPLLPEGPREATRQPSGTGPEDTEGGRHAPELLKHQLLGDLHQEGPPLKGAGGKERPGSKEEVDEDRDVDESSPQDSPPSKASPAQDGRPPQTAAREATSIPGFPAEGAIPLPVDFLSKVSTEIPASEPDGPSVGRAKGQDAPLEFTFHVEITPNVQKEQAHSEEHLGRAAFPGAPGEGPEARGPSLGEDTKEADLPEPSEKQPAAAPRGKPVSRVPQLKARMVSKSKDGTGSDDKKAKTSTRSSAKTLKNRPCLSPKHPTPGSSDPLIQPSSPAVCPEPPSSPKYVSSVTSRTGSSGAKEMKLKGADGKTKIATPRGAAPPGQKGQANATRIPAKTPPAPKTPPSSGEPPKSGDRSGYSSPGSPGTPGSRSRTPSLPTPPTREPKKVAVVRTPPKSPSSAKSRLQTAPVPMPDLKNVKSKIGSTENLKHQPGGGKVQIINKKLDLSNVQSKCGSKDNIKHVPGGGSVQIVYKPVDLSKVTSKCGSLGNIHHKPGGGQVEVKSEKLDFKDRVQSKIGSLDNITHVPGGGNKKIETHKLTFRENAKAKTDHGAEIVYKSPVVSGDTSPRHLSNVSSTGSIDMVDSPQLATLADEVSASLAKQGL

SEQ ID NO: 215 - protein, 412 aa, Homo sapiens
MQPSSLLPLALCLLAAPASALVRIPLHKFTSIRRTMSEVGGSVEDLIAKGPVSKYSQAVPAVTEGPIPEVLKNYMDAQYYGEIGIGTPPQCFTVVFDTGSSNLWVPSIHCKLLDIACWIHHKYNSDKSSTYVKNGTSFDIHYGSGSLSGYLSQDTVSVPCQSASSASALGGVKVERQVFGEATKQPGITFIAAKFDGILGMAYPRISVNNVLPVFDNLMQQKLVDQNIFSFYLSRDPDAQPGGELMLGGTDSKYYKGSLSYLNVTRKAYWQVHLDQVEVASGLTLCKEGCEAIVDTGTSLMVGPVDEVRELQKAIGAVPLIQGEYMIPCEKVSTLPAITLKLGGKGYKLSPEDYTLKVSQAGKTLCLSGFMGMDIPPPSGPLWILGDVFIGRYYTVFDRDNNRVGFAEAARL

SEQ ID NO: 216 - protein, 180 aa, Homo sapiens; identical to SEQ ID NO: 208

SEQ ID NO: 217 - protein, 180 aa, Homo sapiens; identical to SEQ ID NO: 208

SEQ ID NO: 218 - protein, 275 aa, Homo sapiens
MRRSRSSAAAKLRGQKRSGASGASAAPAASAAAALAPSATRTRRSASQAGSKSQAVEKPPSEKPRLRRSSPRAQEEGPGEPPPPELALLPPPPPPPPTPATPTSSASNLDLGEQRERWETFQKRQKLTSEGAAKLLLDTFEYQGLVKHTGGCHCGAVRFEVWASADLHIFDCNCSICKKKQNRHFIVPASRFKLLKGAEHITTYTFNTHKAQHTFCKRCGVQSFYTPRSNPGGFGIAPHCLDEGTVRSMVTEEFNGSDWEKAMKEHKTIKNMSKE

SEQ ID NO: 219 - protein, 616 aa, Homo sapiens
MVGQLSEGAIAAIMQKGDTNIKPILQVINIRPITTGNSPPRYRLLMSDGLNTLSSFMLATQLNPLVEEEQLSSNCVCQIHRFIVNTLKDGRRVVILMELEVLKSAEAVGVKIGNPVPYNEGLGQPQVAPPAPAASPAASSRPQPQNGSSGMGSTVSKAYGASKTFGKAAGPSLSHTSGGTQSKVVPIASLTPYQSKWTICARVTNKSQIRTWSNSRGEGKLFSLELVDESGEIRATAFNEQVDKFFPLIEVNKVYYFSKGTLKIANKQFTAVKNDYEMTFNNETSVMPCEDDHHLPTVQFDFTGIDDLENKSKDSLVDIIGICKSYEDATKITVRSNNREVAKRNIYLMDTSGKVVTATLWGEDADKFDGSRQPVLAIKGARVSDFGGRSLSVLSSSTIIANPDIPEAYKLRGWFDAEGQALDGVSISDLKSGGVGGSNTNWKTLYEVKSENLGQGDKPDYFSSVATVVYLRKENCMYQACPTQDCNKKVIDQQNGLYRCEKCDTEFPNFKYRMILSVNIADFQENQWVTCFQESAEAILGQNAAYLGELKDKNEQAFEEVFQNANFRSFIFRVRVKVETYNDESRIKATVMDVKPVDYREYGRRLVMSIRRSALM

SEQ ID NO: 220 - protein, 317 aa, Homo sapiens
MSSEQKSQHCKPEEGVEAQEEALGLVGAQAPTTEEQEAAVSSSSPLVPGTLEEVPAAESAGPPQSPQGASALPTTISFTCWRQPNEGSSSQEEEGPSTSPDAESLFREALSNKVDELAHFLLRKYRAKELVTKAEMLERVIKNYKRCFPVIFGKASESLKMIFGIDVKEVDPASNTYTLVTCLGLSYDGLLGNNQIFPKTGLLIIVLGTIAMEGDSASEEEIWEELGVMGVYDGREHTVYGEPRKLLTQDWVQENYLEYRQVPGSNPARYEFLWGPRALAETSYVKVLEHVVRVNARVRIAYPSLREAALLEEEEGV

SEQ ID NO: 221 - protein, 109 aa, Homo sapiens
MKFISTSLLLMLLVSSLSPVQGVLEVYYTSLRCRCVQESSVFIPRRFIDRIQILPRGNGCPRKEIIVWKKNKSIVCVDPQAEWIQRMMEVLRKRSSSTLPVPVFKRKIP

SEQ ID NO: 222 - protein, 92 aa, Homo sapiens
MKLCVTVLSLLMLVAAFCSPALSAPMGSDPPTACCFSYTARKLPRNFVVDYYETSSLCSQPAVVFQTKRSKQVCADPSESWVQEYVYDLELN

SEQ ID NO: 223 - protein, 294 aa, Homo sapiens
MATHGQTCARPMCIPPSYADLGKAARDIFNKGFGFGLVKLDVKTKSCSGVEFSTSGSSNTDTGKVTGTLETKYKWCEYGLTFTEKWNTDNTLGTEIAIEDQICQGLKLTFDTTFSPNTGKKSGKIKSSYKRECINLGCDVDFDFAGPAIHGSAVFGYEGWLAGYQMTFDSAKSKLTRNNFAVGYRTGDFQLHTNVNDGTEFGGSIYQKVCEDLDTSVNLAWTSGTNCTRFGIAAKYQLDPTASISAKVNNSSLIGVGYTQTLRPGVKLTLSALVDGKSINAGGHKVGLALELEA

SEQ ID NO: 224 - protein, 579 aa, Homo sapiens
MNKLYIGNLSENAAPSDLESIFKDAKIPVSGPFLVKTGYAFVDCPDESWALKAIEALSGKIELHGKPIEVEHSVPKRQRIRKLQIRNIPPHLQWEVLDSLLVQYGVVESCEQVNTDSETAVVNVTYSSKDQARQALDKLNGFQLENFTLKVAYIPDEMAAQQNPLQQPRGRRGLGQRGSSRQGSPGSVSKQKPCDLPLRLLVPTQFVGAIIGKEGATIRNITKQTQSKIDVHRKENAGAAEKSITILSTPEGTSAACKSILEIMHKEAQDIKFTEEIPLKILAHNNFVGRLIGKEGRNLKKIEQDTDTKITISPLQELTLYNPERTITVKGNVETCAKAEEEIMKKIRESYENDIASMNLQAHLIPGLNLNALGLFPPTSGMPPPTSGPPSAMTPPYPQFEQSETETVHLFIPALSVGAIIGKQGQHIKQLSRFAGASIKIAPAEAPDAKVRMVIITGPPEAQFKAQGRIYGKIKEENFVSPKEEVKLEAHIRVPSFAAGRVIGKGGKTVNELQNLSSAEVVVPRDQTPDENDQVVVKITGHFYACQVAQRKIQEILTQVKQHQQQKALQSGPPQSRRK

SEQ ID NO: 225 - protein, 580 aa, Homo sapiens
MEVPQPEPAPGSALSPAGVCGGAQRPGHLPGLLLGSHGLLGSPVRAAASSPVTTLTQTMHDLAGLGSETPKSQVGTLLFRSRSRLTHLSLSRRASESSLSSESSESSDAGLCMDSPSPMDPHMAEQTFEQAIQAASRIIRNEQFAIRRFQSMPVRLLGHSPVLRNITNSQAPDGRRKSEAGSGAASSSGEDKENDGFVFKMPWKPTHPSSTHALAEWASRREAFAQRPSSAPDLMCLSPDRKMEVEELSPLALGRFSLTPAEGDTEEDDGFVDILESDLKDDDAVPPGMESLISAPLVKTLEKEEEKDLVMYSKCQRLFRSPSMPCSVIRPILKRLERPQDRDTPVQNKRRRSVTPPEEQQEAEEPKARVLRSKSLCHDEIENLLDSDHRELIGDYSKAFLLQTVDGKHQDLKYISPETMVALLTGKFSNIVDKFVIVDCRYPYEYEGGHIKTAVNLPLERDAESFLLKSPIAPCSLDKRVILIFHCEFSSERGPRMCRFIRERDRAVNDYPSLYYPEMYILKGGYKEFFPQHPNFCEPQDYRPMNHEAFKDELKTFRLKTRSWAGERSRRELCSRLQDQ

SEQ ID NO: 226 - protein, 353 aa, Homo sapiens; identical to SEQ ID NO: 19

SEQ ID NO: 227 - protein, 689 aa, Homo sapiens
MADLEAVLADVSYLMAMEKSKATPAARASKKILLPEPSIRSVMQKYLEDRGEVTFEKIFSQKLGYLLFRDFCLNHLEEARPLVEFYEEIKKYEKLETEEERVARSREIFDSYIMKELLACSHPFSKSATEHVQGHLGKKQVPPDLFQPYIEEICQNLRGDVFQKFIESDKFTRFCQWKNVELNIHLTMNDFSVHRIIGRGGFGEVYGCRKADTGKMYAMKCLDKKRIKMKQGETLALNERIMLSLVSTGDCPFIVCMSYAFHTPDKLSFILDLMNGGDLHYHLSQHGVFSEADMRFYAAEIILGLEHMHNRFVVYRDLKPANILLDEHGHVRISDLGLACDFSKKKPHASVGTHGYMAPEVLQKGVAYDSSADWFSLGCMLFKLLRGHSPFRQHKTKDKHEIDRMTLTMAVELPDSFSPELRSLLEGLLQRDVNRRLGCLGRGAQEVKESPFFRSLDWQMVFLQKYPPPLIPPRGEVNAADAFDIGSFDEEDTKGIKLLDSDQELYRNFPLTISERWQQEVAETVFDTINAETDRLEARKKAKNKQLGHEEDYALGKDCIMHGYMSKMGNPFLTQWQRRYFYLFPNRLEWRGEGEAPQSLLTMEEIQSVEETQIKERKCLLLKIRGGKQFILQCDSDPELVQWKKELRDAYREAQQLVQRVPKMKNKPRSPVVELSKVPLVQRGSANGL

SEQ ID NO: 228 - protein, 5478 aa, Homo sapiens
MLVIWILTLALRLCASVTTVTPEGSAVHKAISQQGTLWTGEVLEKQTVEQGKSTLRRQKNHFHRSAGELRCRNALKDEGASAGWSVMFAGESVVVLVHLWMTGARVKNLGLVEFASPGDDGDGRAEGFSLGLPLSEQARAAGAREKERQETVINHSTFSGFSQITGSTVNTSIGGNTTSASTPSSSDPFTTFSDYGVSVTFITGSTATKHFLDSSTNSGHSEESTVSHSGPGATGTTLFPSHSATSVFVGEPKTSPITSASMETTALPGSTTTAGLSEKSTTFYSSPRSPDRTLSPARTTSSGVSEKSTTSHSRPGPTHTIAFPDSTTMPGVSQESTASHSIPGSTDTTLSPGTTTPSSLGPESTTFHSSPGYTKTTRLPDNTTTSGLLEASTPVHSSTGSPHTTLSPSSSTTHEGEPTTFQSWPSSKDTSPAPSGTTSAFVKLSTTYHSSPSSTPTTHFSASSTTLGHSEESTPVHSSPVATATTPPPARSATSGHVEESTAYHRSPGSTQTMHFPESSTTSGHSEESATFHGSTTHTKSSTPSTTAALAHTSYHSSLGSTETTHFRDSSTISGRSEESKASHSSPDAMATTVLPAGSTPSVLVGDSTPSPISSGSMETTALPGSTTKPGLSEKSTTFYSSPRSPDTTHLPASMTSSGVSEESTTSHSRPGSTHTTAFPGSTTMPGLSQESTASHSSPGPTDTTLSPGSTTASSLGPEYTTFHSRPGSTETTLLPDNTTASGLLEASMPVHSSTRSPHTTLSPAGSTTRQGESTTFHSWPSSKDTRPAPPTTTSAFVEPSTTSHGSPSSIPTTHISARSTTSGLVEESTTYHSSPGSTQTMHFPESDTTSGRGEESTTSHSSTTHTISSAPSTTSALVEEPTSYHSSPGSTATTHFPDSSTTSGRSEESTASHSSQDATGTIVLPARSTTSVLLGESTTSPISSGSMETTALPGSTTTPGLSERSTTFHSSPRSPATTLSPASTTSSGVSEESTTSRSRPGSTHTTAFPDSTTTPGLSRHSTTSHSSPGSTDTTLLPASTTTSGPSQESTTSHSSSGSTDTALSPGSTTALSFGQESTTFHSNPGSTHTTLFPDSTTSSGIVEASTRVHSSTGSPRTTLSPASSTSPGLQGESTAFQTHPASTHTTPSPPSTATAPVEESTTYHRSPGSTPTTHFPASSTTSGHSEKSTIFHSSPDASGTTPSSAHSTTSGRGESTTSRISPGSTEITTLPGSTTTPGLSEASTTFYSSPRSPTTTLSPASMTSLGVGEESTTSRSQPGSTHSTVSPASTTTPGLSEESTTVYSSSRGSTETTVFPHSTTTSVHGEEPTTFHSRPASTHTTLFTEDSTTSGLTEESTAFPGSPASTQTGLPATLTTADLGEESTTFPSSSGSTGTKLSPARSTTSGLVGESTPSRLSPSSTETTTLPGSPTTPSLSEKSTTFYTSPRSPDATLSPATTTSSGVSEESSTSHSQPGSTHTTAFPDSTTTSDLSQEPTTSHSSQGSTEATLSPGSTTASSLGQQSTTFHSSPGDTETTLLPDDTITSGLVEASTPTHSSTGSLHTTLTPASSTSAGLQEESTTFQSWPSSSDTTPSPPGTTAAPVEVSTTYHSRPSSTPTTHFSASSTTLGRSEESTTVHSSPGATGTALFPTRSATSVLVGEPTTSPISSGSTETTALPGSTTTAGLSEKSTTFYSSPRSPDTTLSPASTTSSGVSEESTTSHSRPGSTHTTAFPGSTTMPGVSQESTASHSSPGSTDTTLSPGSTTASSLGPESTTFHSSPGSTETTLLPDNTTASGLLEASTPVHSSTGSPHTTLSPAGSTTRQGESTTFQSWPSSKDTMPAPPTTTSAFVELSTTSHGSPSSTPTTHFSASSTTLGRSEESTTVHSSPVATATTPSPARSTTSGLVEESTAYHSSPGSTQTMHFPESSTASGRSEESRTSHSSTTHTISSPPSTTSALVEEPTSYHSSPGSTATTHFPDSSTTSGRSEESTASHSSQDATGTIVLPARSTTSVLLGESTTSPISSGSMETTALPGSTTTPGLSEKSTTFHSSPRSPATTLSPASTTSSGVSEESTTSHSRPGSTHTTAFPDSTTTPGLSRHSTTSHSSPGSTDTTLLPASTTTSGPSQESTTSHSSPGSTDTALSPGSTTALSFGQESTTFHSSPGSTHTTLFPDSTTSSGIVEASTRVHSSTGSPRTTLSPASSTSPGLQGESTAFQTHPASTHTTPSPPSTATAPVEESTTYHRSPGSTPTTHFPASSTTSGHSEKSTIFHSSPDASGTTPSSAHSTTSGRGESTTSRISPGSTEITTLPGSTTTPGLSEASTTFYSSPRSPTTTLSPASMTSLGVGEESTTSRSQPGSTHSTVSPASTTTPGLSEESTTVYSSSPGSTETTVFPRTPTTSVRGEEPTTFHSRPASTHTTLFTEDSTTSGLTEESTAFPGSPASTQTGLPATLTTADLGEESTTFPSSSGSTGTTLSPARSTTSGLVGESTPSRLSPSSTETTTLPGSPTTPSLSEKSTTFYTSPRSPDATLSPATTTSSGVSEESSTSHSQPGSTHTTAFPDSTTTPGLSRHSTTSHSSPGSTDTTLLPASTTTSGPSQESTTSHSSPGSTDTALSPGSTTALSFGQESTTFHSSPGSTHTTLFPDSTTSSGIVEASTRVHSSTGSPRTTLSPASSTSPGLQGESTTFQTHPASTHTTPSPPSTATAPVEESTTYHRSPGSTPTTHFPASSTTSGHSEKSTIFHSSPDASGTTPSSAHSTTSGRGESTTSRISPGSTEITTLPGSTTTPGLSEASTTFYSSPRSPTTTLSPASMTSLGVGEESTTSRSQPGSTHSTVSPASTTTPGLSEESTTVYSSSPGSTETTVFPRSTTTSVRGEEPTTFHSRPASTHTTLFTEDSTTSGLTEESTAFPGSPASTQTGLPATLTTADLGEESTTFPSSSGSTGTTLSPARSTTSGLVGESTPSRLSPSSTETTTLPGSPTTPSLSEKSTTFYTSPRSPDATLSPATTTSSGVSEESSTSHSQPGSTHTTAFPDSTTTSGLSQEPTASHSSQGSTEATLSPGSTTASSLGQQSTTFHSSPGDTETTLLPDDTITSGLVEASTPTHSSTGSLHTTLTPASSTSAGLQEESTTFQSWPSSSDTTPSPPGTTAAPVEVSTTYHSRPSSTPTTHFSASSTTLGRSEESTTVHSSPGATGTALFPTRSATSVLVGEPTTSPISSGSTETTALPGSTTTAGLSEKSTTFYSSPRSPDTTLSPASTTSSGVSEESTTSHSRPGSTHTTAFPGSTTMPGVSQESTASHSSPGSTDTTLSPGSTTASSLGPESTTFHSGPGSTETTLLPDNTTASGLLEASTPVHSSTGSPHTTLSPAGSTTRQGESTTFQSWPNSKDTTPAPPTTTSAFVELSTTSHGSPSSTPTTHFSASSTTLGRSEESTTVHSSPVATATTPSPARSTTSGLVEESTTYHSSPGSTQTMHFPESDTTSGRGEESTTSHSSTTHTISSAPSTTSALVEEPTSYHSSPGSTATTHFPDSSTTSGRSEESTASHSSQDATGTIVLPARSTTSVLLGESTTSPISSGSMETTALPGSTTTPGLSEKSTTFHSSPRSPATTLSPASTTSSGVSEESTTSHSRPGSTHTTAFPDSTTTPGLSRHSTTSHSSPGSTDTTLLPASTTTSGSSQESTTSHSSSGSTDTALSPGSTTALSFGQESTTFHSSPGSTHTTLFPDSTTSSGIVEASTRVHSSTGSPRTTLSPASSTSPGLQGESTAFQTHPASTHTTPSPPSTATAPVEESTTYHRSPGSTPTTHFPASSTTSGHSEKSTIFHSSPDASGTTPSSAHSTTSGRGESTTSRISPGSTEITTLPGSTTTPGLSEASTTFYSSPRSPTTTLSPASMTSLGVGEESTTSRSQPGSTHSTVSPASTTTPGLSEESTTVYSSSPGSTETTVFPRSTTTSVRREEPTTFHSRPASTHTTLFTEDSTTSGLTEESTAFPGSPASTQTGLPATLTTADLGEESTTFPSSSGSTGTKLSPARSTTSGLVGESTPSRLSPSSTETTTLPGSPTTPSLSEKSTTFYTSPRSPDATLSPATTTSSGVSEESSTSHSQPGSTHTTAFPDSTTTSGLSQEPTTSHSSQGSTEATLSPGSTTASSLGQQSTTFHSSPGDTETTLLPDDTITSGLVEASTPTHSSTGSLHTTLTPASSTSTGLQEESTTFQSWPSSSDTTPSPPSTTAVPVEVSTTYHSRPSSTPTTHFSASSTTLGRSEESTTVHSSPGATGTALFPTRSATSVLVGEPTTSPISSGSTETTALPGSTTTAGLSEKSTTFYSSPRSPDTTLSPASTTSSGVSEESTTSHSRPGSMHTTAFPSSTTMPGVSQESTASHSSPGSTDTTLSPGSTTASSLGPESTTFHSSPGSTETTLLPDNTTASGLLEASTPVHSSTGSPHTTLSPAGSTTRQGESTTFQSWPNSKDTTPAPPTTTSAFVELSTTSHGSPSSTPTTHFSASSTTLGRSEESTTVHSSPVATATTPSPARSTTSGLVEESTTYHSSPGSTQTMHFPESNTTSGRGEESTTSHSSTTHTISSAPSTTSALVEEPTSYHSSPGSTATTHFPDSSTTSGRSEESTASHSSQDATGTIVLPARSTTSVLLGESTTSPISSGSMETTALPGSTTTPGLSEKSTTFHSSPSSTPTTHFSASSTTLGRSEESTTVHSSPVATATTPSPARSTTSGLVEESTAYHSSPGSTQTMHFPESSTASGRSEESRTSHSSTTHTISSPPSTTSALVEEPTSYHSSPGSIATTHFPESSTTSGRSEESTASHSSPDTNGITPLPAHFTTSGRIAESTTFYISPGSMETTLASTATTPGLSAKSTILYSSSRSPDQTLSPASMTSSSISGEPTSLYSQAESTHTTAFPASTTTSGLSQESTTFHSKPGSTETTLSPGSITTSSFAQEFTTPHSQPGSALSTVSPASTTVPGLSEESTTFYSSPGSTETTAFSHSNTMSIHSQQSTPFPDSPGFTHTVLPATLTTTDIGQESTAFHSSSDATGTTPLPARSTASDLVGEPTTFYISPSPTYTTLFPASSSTSGLTEESTTFHTSPSFTSTIVSTESLETLAPGLCQEGQIWNGKQCVCPQGYVGYQCLSPLESFPVETPEKLNATLGMTVKVTYRNFTEKMNDASSQEYQNFSTLFKNRMDVVLKGDNLPQYRGVNIRRLLNGSIVVKNDVILEADYTLEYEELFENLAEIVKAKIMNETRTTLLDPDSCRKAILCYSEEDTFVDSSVTPGFDFQEQCTQKAAEGYTQFYYVDVLDGKLACVNKCTKGTKSQMNCNLGTCQLQRSGPRCLCPNTNTHWYWGETCEFNIAKSLVYGIVGAVMAVLLLALIILIILFSLSQRKRHREQYDVPQEWRKEGTPGIFQKTAIWEDQNLRESRFGLENAYNNFRPTLETVDSGTELHIQRPEMVASTV

SEQ ID NO: 229 - protein, 724 aa, Homo sapiens
MPEEVHHGEEEVETFAFQAEIAQLMSLIINTFYSNKEIFLRELISNASDALDKIRYESLTDPSKLDSGKELKIDIIPNPQERTLTLVDTGIGMTKADLINNLGTIAKSGTKAFMEALQAGADISMIGQFGVGFYSAYLVAEKVVVITKHNDDEQYAWESSAGGSFTVRADHGEPIGRGTKVILHLKEDQTEYLEERRVKEVVKKHSQFIGYPITLYLEKEREKEISDDEAEEEKGEKEEEDKDDEEKPKIEDVGSDEEDDSGKDKKKKTKKIKEKYIDQEELNKTKPIWTRNPDDITQEEYGEFYKSLTNDWEDHLAVKHFSVEGQLEFRALLFIPRRAPFDLFENKKKKNNIKLYVRRVFIMDSCDELIPEYLNFIRGVVDSEDLPLNISREMLQQSKILKVIRKNIVKKCLELFSELAEDKENYKKFYEAFSKNLKLGIHEDSTNRRRLSELLRYHTSQSGDEMTSLSEYVSRMKETQKSIYYITGESKEQVANSAFVERVRKRGFEVVYMTEPIDEYCVQQLKEFDGKSLVSVTKEGLELPEDEEEKKKMEESKAKFENLCKLMKEILDKKVEKVTISNRLVSSPCCIVTSTYGWTANMERIMKAQALRDNSTMGYMMAKKHLEINPDHPIVETLRQKAEADKNDKAVKDLVVLLFETALLSSGFSLEDPQTHSNRIYRMIKLGLGIDEDEVAAEEPNAAVPDEIPPLEGDEDASRMEEVD

SEQ ID NO: 230 - protein, 177 aa, Homo sapiens
MRERPRLGEDSSLISLFLQVVAFLAMVMGTHTYSHWPSCCPSKGQDTSEELLRWSTVPVPPLEPARPNRHPESCRASEDGPLNSRAISPWRYELDRDLNRLPQDLYHARCLCPHCVSLQTGSHMDPRGNSELLYHNQTVFYRRPCHGEKGTHKGYCLERRLYRVSLACVCVRPRVMG

SEQ ID NO: 231 - protein, 343 aa, Homo sapiens
MPRGQKSKLRAREKRHQARCENQDLGATQATVAEGESPSPAYLLFGDRPQNLPAAETPSIPEALQGAPSTTNAIAPVSCSSNEGASSQDEKSLGSSREAEGWKEDPLNKKVVSLVHFLLQKYETKEPITKGDMIKFVIRKDKCHFNEILKRASEHMELALGVDLKEVDPIRHYYAFFSKLDLTYDETTSDEEKIPKTGLLMIALGVIFLNGNRAPEEAVWEIMNMMGVYADRKHFLYGDPRKVMTKDLVQLKYLEYQQVPNSDPPRYEFLWGPRAHAETSKMKVLEFVAKIHDTVPSAFPSCYEEALRDEEQRTQARAAARAHTAAMANARSRTTSSSFSHAK

SEQ ID NO: 232 - protein, 477 aa, Homo sapiens
MFPVFPCTLLAPPFPVLGLDSRGVGGLMNSFPPPQGHAQNPLQVGAELQSRFFASQGCAQSPFQAAPAPPPTPQAPAAEPLQVDLLPVLAAAQESAAAAAAAAAAAAAVAAAPPAPAAASTVDTAALKQPPAPPPPPPPVSAPAAEAAPPASAATIAAAAATAVVAPTSTVAVAPVASALEKKTKSKGPYICALCAKEFKNGYNLRRHEAIHTGAKAGRVPSGAMKMPTMVPLSLLSVPQLSGAGGGGGEAGAGGGAAAVAAGGVVTTTASGKRIRKNHACEMCGKAFRDVYHLNRHKLSHSDEKPYQCPVCQQRFKRKDRMSYHVRSHDGAVHKPYNCSHCGKSFSRPDHLNSHVRQVHSTERPFKCEKCEAAFATKDRLRAHTVRHEEKVPCHVCGKMLSSAYISDHMKVHSQGPHHVCELCNKGTGEVCPMAAAAAAAAAAAAAAVAAPPTAVGSLSGAEGVPVSSQPLPSQPW

SEQ ID NO: 233 - protein, 206 aa, Homo sapiens
MAANKSKGQSSLALHKVIMVGSGGVGKSALTLQFMYDEFVEDYEPTKADSYRKKVVLDGEEVQIDILDTAGQEDYAAIRDNYFRSGEGFLLVFSITEHESFTATAEFREQILRVKAEEDKIPLLVVGNKSDLEERRQVPVEEARSKAEEWGVQYVETSAKTRANVDKVFFDLMREIRTKKMSENKDKNGKKSSKNKKSFKERCCLL

SEQ ID NO: 234 - protein, 356 aa, Homo sapiens
MSRPLLITFTPATDPSDLWKDGQQQPQPEKPESTLDGAAARAFYEALIGDESSAPDSQRSQTEPARERKRKKRRIMKAPAAEAVAEGASGRHGQGRSLEAEDKMTHRILRAAQEGDLPELRRLLEPHEAGGAGGNINARDAFWWTPLMCAARAGQGAAVSYLLGRGAAWVGVCELSGRDAAQLAEEAGFPEVARMVRESHGETRSPENRSPTPSLQYCENCDTHFQDSNHRTSTAHLLSLSQGPQPPNLPLGVPISSPGFKLLLRGGWEPGMGLGPRGEGRANPIPTVLKRDQEGLGYRSAPQPRVTHFPAWDTRAVAGRERPPRVATLSWREERRREEKDRAWERDLRTYMNLEF

SEQ ID NO: 235 - protein, 370 aa, Homo sapiens
MHRLIFVYTLICANFCSCRDTSATPQSASIKALRNANLRRDESNHLTDLYRRDETIQVKGNGYVQSPRFPNSYPRNLLLTWRLHSQENTRIQLVFDNQFGLEEAENDICRYDFVEVEDISETSTIIRGRWCGHKEVPPRIKSRTNQIKITFKSDDYFVAKPGFKIYYSLLEDFQPAAASETNWESVTSSISGVSYNSPSVTDPTLIADALDKKIAEFDTVEDLLKYFNPESWQEDLENMYLDTPRYRGRSYHDRKSKVDLDRLNDDAKRYSCTPRNYSVNIREELKLANVVFFPRCLLVQRCGGNCGCGTVNWRSCTCNSGKTVKKYHEVLQFEPGHIKRRGRAKTMALVDIQLDHHERCDCICSSRPPR

SEQ ID NO: 236 - protein, 432 aa, Homo sapiens
MERRRITSAARRSYVSSGEMMVGGLAPGRRLGPGTRLSLARMPPPLPTRVDFSLAGALNAGFKETRASERAEMMELNDRFASYIEKVRFLEQQNKALAAELNQLRAKEPTKLADVYQAELRELRLRLDQLTANSARLEVERDNLAQDLATVRQKLQDETNLRLEAENNLAAYRQEADEATLARLDLERKIESLEEEIRFLRKIHEEEVRELQEQLARQQVHVELDVAKPDLTAALKEIRTQYEAMASSNMHEAEEWYRSKFADLTDAAARNAELLRQAKHEANDYRRQLQSLTCDLESLRGTNESLERQMREQEERHVREAASYQEALARLEEEGQSLKDEMARHLQEYQDLLNVKLALDIEIATYRKLLEGEENRITIPVQTFSNLQIRETSLDTKSVSEGHLKRNIVVKTVEMRDGEVIKESKQEHKDVM

SEQ ID NO: 237 - protein, 171 aa, Homo sapiens
MLVNFILRCGLLLVTLSLAIAKHKQSSFTKSCYPRGTLSQAVDALYIKAAWLKATIPEDRIKNIRLLKKKTKKQFMKNCQFQEQLLSFFMEDVFGQLQLQGCKKIRFVEDFHSLRQKLSHCISCASSAREMKSITRMKRIFYRIGNKGIYKAISELDILLSWIKKLLESSQ

SEQ ID NO: 238 - protein, 198 aa, Homo sapiens
MASGNARIGKPAPDFKATAVVDGAFKEVKLSDYKGKYVVLFFYPLDFTFVCPTEIIAFSNRAEDFRKLGCEVLGVSVDSQFTHLAWINTPRKEGGLGPLNIPLLADVTRRLSEDYGVLKTDEGIAYRGLFIIDGKGVLRQITVNDLPVGRSVDEALRLVQAFQYTDEHGEVCPAGWKPGSDTIKPNVDDSKEYFSKHN

SEQ ID NO: 239 - protein, 224 aa, Homo sapiens
MSVFGKLFGAGGGKAGKGGPTPQEAIQRLRDTEEMLSKKQEFLEKKIEQELTAAKKHGTKNKRAALQALKRKKRYEKQLAQIDGTLSTIEFQREALENANTNTEVLKNMGYAAKAMKAAHDNMDIDKVDELMQDIADQQELAEEISTAISKPVGFGEEFDEDELMAELEELEQEELDKNLLEISGPETVPLPNVPSIALPSKPAKKKEEEDDDMKELENWAGSM

SEQ ID NO: 240 - protein, 3097 aa, Homo sapiens
MSGSSGGAAAPAASSGPAAAASAAGSGCGGGAGEGAEEAAKDLADIAAFFRSGFRKNDEMKAMDVLPILKEKVAYLSGGRDKRGGPILTFPARSNHDRIRQEDLRRLISYLACIPSEEVCKRGFTVIVDMRGSKWDSIKPLLKILQESFPCCIHVALIIKPDNFWQKQRTNFGSSKFEFETNMVSLEGLTKVVDPSQLTPEFDGCLEYNHEEWIEIRVAFEDYISNATHMLSRLEELQDILAKKELPQDLEGARNMIEEHSQLKKKVIKAPIEDLDLEGQKLLQRIQSSESFPKKNSGSGNADLQNLLPKVSTMLDRLHSTRQHLHQMWHVRKLKLDQCFQLRLFEQDAEKMFDWITHNKGLFLNSYTEIGTSHPHAMELQTQHNHFAMNCMNVYVNINRIMSVANRLVESGHYASQQIRQIASQLEQEWKAFAAALDERSTLLDMSSIFHQKAEKYMSNVDSWCKACGEVDLPSELQDLEDAIHHHQGIYEHITLAYSEVSQDGKSLLDKLQRPLTPGSSDSLTASANYSKAVHHVLDVIHEVLHHQRQLENIWQHRKVRLHQRLQLCVFQQDVQQVLDWIENHGEAFLSKHTGVGKSLHRARALQKRHEDFEEVAQNTYTNADKLLEAAEQLAQTGECDPEEIYQAAHQLEDRIQDFVRRVEQRKILLDMSVSFHTHVKELWTWLEELQKELLDDVYAESVEAVQDLIKRFGQQQQTTLQVTVNVIKEGEDLIQQLRDSAISSNKTPHNSSINHIETVLQQLDEAQSQMEELFQERKIKLELFLQLRIFERDAIDIISDLESWNDELSQQMNDFDTEDLTIAEQRLQHHADKALTMNNLTFDVIHQGQDLLQYVNEVQASGVELLCDRDVDMATRVQDLLEFLHEKQQELDLAAEQHRKHLEQCVQLRHLQAEVKQVLGWIRNGESMLNAGLITASSLQEAEQLQREHEQFQHAIEKTHQSALQVQQKAEAMLQANHYDMDMIRDCAEKVASHWQQLMLKMEDRLKLVNASVAFYKTSEQVCSVLESLEQEYKREEDWCGGADKLGPNSETDHVTPMISKHLEQKEAFLKACTLARRNADVFLKYLHRNSVNMPGMVTHIKAPEQQVKNILNELFQRENRVLHYWTMRKRRLDQCQQYVVFERSAKQALEWIHDNGEFYLSTHTSTGSSIQHTQELLKEHEEFQITAKQTKERVKLLIQLADGFCEKGHAHAAEIKKCVTAVDKRYRDFSLRMEKYRTSLEKALGISSDSNKSSKSLQLDIIPASIPGSEVKLRDAAHELNEEKRKSARRKEFIMAELIQTEKAYVRDLRECMDTYLWEMTSGVEEIPPGIVNKELIIFGNMQEIYEFHNNIFLKELEKYEQLPEDVGHCFVTWADKFQMYVTYCKNKPDSTQLILEHAGSYFDEIQQRHGLANSISSYLIKPVQRITKYQLLLKELLTCCEEGKGEIKDGLEVMLSVPKRANDAMHLSMLEGFDENIESQGELILQESFQVWDPKTLIRKGRERHLFLFEMSLVFSKEVKDSSGRSKYLYKSKLFTSELGVTEHVEGDPCKFALWVGRTPTSDNKIVLKASSIENKQDWIKHIREVIQERTIHLKGALKEPIHIPKTAPATRQKGRRDGEDLDSQGDGSSQPDTISIASRTSQNTLDSDKLSGGCELTVVIHDFTACNSNELTIRRGQTVEVLERPHDKPDWCLVRTTDRSPAAEGLVPCGSLCIAHSRSSMEMEGIFNHKDSLSVSSNDASPPASVASLQPHMIGAQSSPGPKRPGNTLRKWLTSPVRRLSSGKADGHVKKLAHKHKKSREVRKSADAGSQKDSDDSAATPQDETVEERGRNEGLSSGTLSKSSSSGMQSCGEEEGEEGADAVPLPPPMAIQQHSLLQPDSQDDKASSRLLVRPTSSETPSAAELVSAIEELVKSKMALEDRPSSLLVDQGDSSSPSFNPSDNSLLSSSSPIDEMEERKSSSLKRRHYVLQELVETERDYVRDLGYVVEGYMALMKEDGVPDDMKGKDKIVFGNIHQIYDWHRDFFLGELEKCLEDPEKLGSLFVKHERRLHMYIAYCQNKPKSEHIVSEYIDTFFEDLKQRLGHRLQLTDLLIKPVQRIMKYQLLLKDFLKYSKKASLDTSELERAVEVMCIVPRRCNDMMNVGRLQGFDGKIVAQGKLLLQDTFLVTDQDAGLLPRCRERRIFLFEQIVIFSEPLDKKKGFSMPGFLFKNSIKVSCLCLEENVENDPCKFALTSRTGDVVETFILHSSSPSVRQTWIHEINQILENQRNFLNALTSPIEYQRNHSGGGGGGGSGGSGGGGGSGGGGAPSGGSGHSGGPSSCGGAPSTSRSRPSRIPQPVRHHPPVLVSSAASSQAEADKMSGTSTPGPSLPPPGAAPEAGPSAPSRRPPGADAEGSEREAEPIPKMKVLESPRKGAANASGSSPDAPAKDARASLGTLPLGKPRAGAASPLNSPLSSAVPSLGKEPFPPSSPLQKGGSFWSSIPASPASRPGSFTFPGDSDSLQRQTPRHAAPGKDTDRMSTCSSASEQSVQSTQSNGSESSSSSNISTMLVTHDYTAVKEDEINVYQGEVVQILASNQQNMFLVFRAATDQCPAAEGWIPGFVLGHTSAVIVENPDGTLKKSTSWHTALRLRKKSEKKDKDGKREGKLENGYRKSREGLSNKVSVKLLNPNYIYDVPPEFVIPLSEVTCETGETVVLRCRVCGRPKASITWKGPEHNTLNNDGHYSISYSDLGEATLKIVGVTTEDDGIYTCIAVNDMGSASSSASLRVLGPGMDGIMVTWKDNFDSFYSEVAELGRGRFSVVKKCDQKGTKRAVATKFVNKKLMKRDQVTHELGILQSLQHPLLVGLLDTFETPTSYILVLEMADQGRLLDCVVRWGSLTEGKIRAHLGEVLEAVRYLHNCRIAHLDLKPENILVDESLAKPTIKLADFGDAVQLNTTYYIHQLLGNPEFAAPEIILGNPVSLTSDTWSVGVLTYVLLSGVSPFLDDSVEETCLNICRLDFSFPDDYFKGVSQKAKEFVCFLLQEDPAKRPSAALALQEQWLQAGNGRSTGVLDTSRLTSFIERRKHQNDVRPIRSIKNFLQSRLLPRV

SEQ ID NO: 241 - protein, 161 aa, Homo sapiens
MDDIYKAAVEQLTEEQKNEFKAAFDIFVLGAEDGCISTKELGKVMRMLGQNPTPEELQEMIDEVDEDGSGTVDFDEFLVMMVRCMKDDSKGKSEEELSDLFRMFDKNADGYIDLDELKIMLQATGETITEDDIEELMKDGDKNNDGRIDYDEFLEFMKGVE

SEQ ID NO: 242 - protein, 408 aa, Homo sapiens
MIPGNRMLMVVLLCQVLLGGASHASLIPETGKKKVAEIQGHAGGRRSGQSHELLRDFEATLLQMFGLRRRPQPSKSAVIPDYMRDLYRLQSGEEEEEQIHSTGLEYPERPASRANTVRSFHHEEHLENIPGTSENSAFRFLFNLSSIPENEVISSAELRLFREQVDQGPDWERGFHRINIYEVMKPPAEVVPGHLITRLLDTRLVHHNVTRWETFDVSPAVLRWTREKQPNYGLAIEVTHLHQTRTHQGQHVRISRSLPQGSGNWAQLRPLLVTFGHDGRGHALTRRRRAKRSPKHHSQRARKKNKNCRRHSLYVDFSDVGWNDWIVAPPGYQAFYCHGDCPFPLADHLNSTNHAIVQTLVNSVNSSIPKACCVPTELSAISMLYLDEYDKVVLKNYQEMVVEGCGCR

SEQ ID NO: 243 - protein, 871 aa, Homo sapiens
MGEGGLPPAFQLLLRACDQGDTETARRLLEPGAAEPAERGAEPEAGAEPAGAEVAGPGAAAAGAVGAPVPVDCSDEAGNTALQFAAAGGHEPLVRFLLRRGASVNSRNHYGWSALMQAARFGHVSVAHLLLDHGADVNAQNRLGASVLTVASRGGHLGVVKLLLEAGAFVDHHHPSGEQLGLGGSRDEPLDITALMAAIQHGHEAVVRLLMEWGADPNHAARTVGWSPLMLAALTGRLGVAQQLVEKGANPDHLSVLEKTAFEVALDCKHRDLVDYLDPLTTVRPKTDEEKRRPDIFHALKMGNFQLVKEIADEDPSHVNLVNGDGATPLMLAAVTGQLALVQLLVERHADVDKQDSVHGWTALMQATYHGNKEIVKYLLNQGADVTLRAKNGYTAFDLVMLLNDPDTELVRLLASVCMQVNKDKGRPSHQPPLPHSKVRQPWSIPVLPDDKGGLKSWWNRMSNRFRKLKLMQTLPRGLSSNQPLPFSDEPEPALDSTMRAAPQDKTSRSALPDAAPVTKDNGPGSTRGEKEDTLLTTMLRNGAPLTRLPSDKLKAVIPPFLPPSSFELWSSDRSRTRHNGKADPMKTALPQRASRGHPVGGGGTDTTPVRPVKFPSLPRSPASSANSGNFNHSPHSSGGSSGVGVSRHGGELLNRSGGSIDNVLSQIAAQRKKAAGLLEQKPSHRSSPVGPAPGSSPSELPASPAGGSAPVGKKLETSKRPPSGTSTTSKSTSPTLTPSPSPKGHTAESSVSSSSSHRQSKSSGGSSSGTITDEDELTGILKKLSLEKYQPIFEEQEVDMEAFLTLTDGDLKELGIKTDGSRQQILAAISELNAGKGRERQILQETIHNFHSSFESSASNTRAPGNSPCA

SEQ ID NO: 244 - protein, 467 aa, Homo sapiens
MSSAPTTPPSVDKVDGFSRKSVRKARQKRSQSSSQFRSQGKPIELTPLPLLKDVPSSEQPELFLKKLQQCCVIFDFMDTLSDLKMKEYKRSTLNELVDYITISRGCLTEQTYPEVVRMVSCNIFRTLPPSDSNEFDPEEDEPTLEASWPHLQLVYEFFIRFLESQEFQPSIAKKYIDQKFVLQLLELFDSEDPRERDYLKTVLHRIYGKFLGLRAFIRKQINNIFLRFVYETEHFNGVAELLEILGSIINGFALPLKAEHKQFLVKVLIPLHTVRSLSLFHAQLAYCIVQFLEKDPSLTEPVIRGLMKFWPKTCSQKEVMFLGELEEILDVIEPSQFVKIQEPLFKQIAKCVSSPHFQVAERALYYWNNEYIMSLIEENSNVILPIMFSSLYRISKEHWNPAIVALVYNVLKAFMEMNSTMFDELTATYKSDRQREKKKEKEREELWKKLEDLELKRGLRRDGIIPT

SEQ ID NO: 245 - protein, 304 aa, Homo sapiens
MAGNFDSEERSSWYWGRLSRQEAVALLQGQRHGVFLVRDSSTSPGDYVLSVSENSRVSHYIINSSGPRPPVPPSPAQPPPGVSPSRLRIGDQEFDSLPALLEFYKIHYLDTTTLIEPVSRSRQGSGVILRQEEAEYVRALFDFNGNDEEDLPFKKGDILRIRDKPEEQWWNAEDSEGKRGMIPVPYVEKYRPASASVSALIGGNQEGSHPQPLGGPEPGPYAQPSVNTPLPNLQNGPIYARVIQKRVPNAYDKTALALEVGELVKVTKINVSGQWEGECNGKRGHFPFTHVRLLDQQNPDEDFS

SEQ ID NO: 246 - protein, 142 aa, Homo sapiens
MGAPTLPPAWQPFLKDHRISTFKNWPFLEGCACTPERMAEAGFIHCPTENEPDLAQCFFCFKELEGWEPDDDPIEEHKKHSSGCAFLSVKKQFEELTLGEFLKLDRERAKNKIAKETNNKKKEFEETAKKVRRAIEQLAAMD

SEQ ID NO: 247 - protein, 1180 aa, Homo sapiens
MSADSSPLVGSTPTGYGTLTIGTSIDPLSSSVSSVRLSGYCGSPWRVIGYHVVVWMMAGIPLLLFRWKPLWGVRLRLRPCNLAHAETLVIEIRDKEDSSWQLFTVQVQTEAIGEGSLEPSPQSQAEDGRSQAAVGAVPEGAWKDTAQLHKSEEAVSVGQKRVLRYYLFQGQRYIWIETQQAFYQVSLLDHGRSCDDVHRSRHGLSLQDQMVRKAIYGPNVISIPVKSYPQLLVDEALNPYYGFQAFSIALWLADHYYWYALCIFLISSISICLSLYKTRKQSQTLRDMVKLSMRVCVCRPGGEEEWVDSSELVPGDCLVLPQEGGLMPCDAALVAGECMVNESSLTGESIPVLKTALPEGLGPYCAETHRRHTLFCGTLILQARAYVGPHVLAVVTRTGFCTAKGGLVSSILHPRPINFKFYKHSMKFVAALSVLALLGTIYSIFILYRNRVPLNEIVIRALDLVTVVVPPALPAAMTVCTLYAQSRLRRQGIFCIHPLRINLGGKLQLVCFDKTGTLTEDGLDVMGVVPLKGQAFLPLVPEPRRLPVGPLLRALATCHALSRLQDTPVGDPMDLKMVESTGWVLEEEPAADSAFGTQVLAVMRPPLWEPQLQAMEEPPVPVSVLHRFPFSSALQRMSVVVAWPGATQPEAYVKGSPELVAGLCNPETVPTDFAQMLQSYTAAGYRVVALASKPLPTVPSLEAAQQLTRDTVEGDLSLLGLLVMRNLLKPQTTPVIQALRRTRIRAVMVTGDNLQTAVTVARGCGMVAPQEHLIIVHATHPERGQPASLEFLPMESPTAVNGVKDPDQAASYTVEPDPRSRHLALSGPTFGIIVKHFPKLLPKVLVQGTVFARMAPEQKTELVCELQKLQYCVGMCGDGANDCGALKAADVGISLSQAEASVVSPFTSSMASIECVPMVIREGRCSLDTSFSVFKYMALYSLTQFISVLILYTINTNLGDLQFLAIDLVITTTVAVLMSRTGPALVLGRVRPPGALLSVPVLSSLLLQMVLVTGVQLGGYFLTLAQPWFVPLNRTVAAPDNLPNYENTVVFSLSSFQYLILAAAVSKGAPFRRPLYTNVPFLVALALLSSVLVGLVLVPGLLQGPLALRNITDTGFKLLLLGLVTLNFVGAFMLESVLDQCLPACLRRLRPKRASKKRFKQLERELAEQPWPPLPAGPLR

SEQ ID NO: 248 - protein, 739 aa, Homo sapiens
MPSPRPVLLRGARAALLLLLPPRLLARPSLLLRRSLSAASCPPISLPAAASRSSMDGAGAEEVLAPLRLAVRQQGDLVRKLKEDKAPQVDVDKAVAELKARKRVLEAKELALQPKDDIVDRAKMEDTLKRRFFYDQAFAIYGGVSGLYDFGPVGCALKNNIIQTWRQHFIQEEQILEIDCTMLTPEPVLKTSGHVDKFADFMVKDVKNGECFRADHLLKAHLQKLMSDKKCSVEKKSEMESVLAQLDNYGQQELADLFVNYNVKSPITGNDLSPPVSFNLMFKTFIGPGGNMPGYLRPETAQGIFLNFKRLLEFNQGKLPFAAAQIGNSFRNEISPRSGLIRVREFTMAEIEHFVDPSEKDHPKFQNVADLHLYLYSAKAQVSGQSARKMRLGDAVEQGVINNTVLGYFIGRIYLYLTKVGISPDKLRFRQHMENEMAHYACDCWDAESKTSYGWIEIVGCADRSCYDLSCHARATKVPLVAEKPLKEPKTVNVVQFEPSKGAIGKAYKKDAKLVMEYLAICDECYITEMEMLLNEKGEFTIETEGKTFQLTKDMINVKRFQKTLYVEEVVPNVIEPSFGLGRIMYTVFEHTFHVREGDEQRTFFSFPAVVAPFKCSVLPLSQNQEFMPFVKELSEALTRHGVSHKVDDSSGSIGRRYARTDEIGVAFGVTIDFDTVNKTPHTATLRDRDSMRQIRAEISELPSIVQDLANGNITWADVEARYPLFEGQETGKKETIEE

SEQ ID NO: 249 - protein, 375 aa, Homo sapiens
MDDDIAALVVDNGSGMCKAGFAGDDAPRAVFPSIVGRPRHQGVMVGMGQKDSYVGDEAQSKRGILTLKYPIEHGIVTNWDDMEKIWHHTFYNELRVAPEEHPVLLTEAPLNPKANREKMTQIMFETFNTPAMYVAIQAVLSLYASGRTTGIVMDSGDGVTHTVPIYEGYALPHAILRLDLAGRDLTDYLMKILTERGYSFTTTAEREIVRDIKEKLCYVALDFEQEMATAASSSSLEKSYELPDGQVITIGNERFRCPEALFQPSFLGMESCGIHETTFNSIMKCDVDIRKDLYANTVLSGGTTMYPGIADRMQKEITALAPSTMKIKIIAPPERKYSVWIGGSILASLSTFQQMWISKQEYDESGPSIVHRKCF

SEQ ID NO: 250 - protein, 1093 aa, Homo sapiens
MKEMVGGCCVCSDERGWAENPLVYCDGHACSVAVHQACYGIVQVPTGPWFCRKCESQERAARVRCELCPHKDGALKRTDNGGWAHVVCALYIPEVQFANVLTMEPIVLQYVPHDRFNKTCYICEEQGRESKAASGACMTCNRHGCRQAFHVTCAQMAGLLCEEEVLEVDNVKYCGYCKYHFSKMKTSRHSSGGGGGGAGGGGGSMGGGGSGFISGRRSRSASPSTQQEKHPTHHERGQKKSRKDKERLKQKHKKRPESPPSILTPPVVPTADKVSSSASSSSHHEASTQETSESSRESKGKKSSSHSLSHKGKKLSSGKGVSSFTSASSSSSSSSSSSGGPFQPAVSSLQSSPDFSAFPKLEQPEEDKYSKPTAPAPSAPPSPSAPEPPKADLFEQKVVFSGFGPIMRFSTTTSSSGRARAPSPGDYKSPHVTGSGASAGTHKRMPALSATPVPADETPETGLKEKKHKASKRSRHGPGRPKGSRNKEGTGGPAAPSLPSAQLAGFTATAASPFSGGSLVSSGLGGLSSRTFGPSGSLPSLSLESPLLGAGIYTSNKDPISHSGGMLRAVCSTPLSSSLLGPPGTSALPRLSRSPFTSTLPSSSASISTTQVFSLAGSTFSLPSTHIFGTPMGAVNPLLSQAESSHTEPDLEDCSFRCRGTSPQESLSSMSPISSLPALFDQTASAPCGGGQLDPAAPGTTNMEQLLEKQGDGEAGVNIVEMLKALHALQKENQRLQEQILSLTAKKERLQILNVQLSVPFPALPAALPAANGPVPGPYGLPPQAGSSDSLSTSKSPPGKSSLGLDNSLSTSSEDPHSGCPSRSSSSLSFHSTPPPLPLLQQSPATLPLALPGAPAPLPPQPQNGLGRAPGAAGLGAMPMAEGLLGGLAGSGGLPLNGLLGGLNGAAAPNPASLSQAGGAPTLQLPGCLNSLTEQQRHLLQQQEQQLQQLQQLLASPQLTPEHQTVVYQMIQQIQQKRELQRLQMAGGSQLPMASLLAGSSTPLLSAGTPGLLPTASAPPLLPAGALVAPSLGNNTSLMAAAAAAAAVAAAGGPPVLTAQTNPFLSLSGAEGSGGGPKGGTADKGASANQEKG

SEQ ID NO: 251 - protein, 411 aa, Homo sapiens
MMGRSPGFAMQHIVGVPHVLVRRGLLGRDLFMTRTLCSPGPSQPGEKRPEEVALGLHHRLPALGRALGHSIQQRATSTAKTWWDRYEEFVGLNEVREAQGKVTEAEKVFMVARGLVREAREDLEVHQAKLKEVRDRLDRVSREDSQYLELATLEHRMLQEEKRLRTAYLRAEDSEREKFSLFSAAVRESHEKERTRAERTKNWSLIGSVLGALIGVAGSTYVNRVRLQELKALLLEAQKGPVSLQEAIREQASSYSRQQRDLHNLMVDLRGLVHAAGPGQDSGSQAGSPPTRDRDVDVLSAALKEQLSHSRQVHSCLEGLREQLDGLEKTCSQMAGVVQLVKSAAHPGLVEPADGAMPSFLLEQGSMILALSDTEQRLEAQVNRNTIYSTLVTCVTFVATLPVLYMLFKAS

SEQ ID NO: 252 - protein, 170 aa, Homo sapiens
MGNEASYPAEMCSHFDNDEIKRLGRRFKKLDLDKSGSLSVEEFMSLPELRHNPLVRRVIDVFDTDGDGEVDFKEFILGTSQFSVKGDEEQKLRFAFSIYDMDKDGYISNGELFQVLKMMVGNNLTDWQLQQLVDKTIIILDKDGDGKISFEEFSAVVRDLEIHKKLVLIV

SEQ ID NO: 253 - protein, 241 aa, Homo sapiens
MNRCWALFLSLCCYLRLVSAEGDPIPEELYEMLSDHSIRSFDDLQRLLHGDPGEEDGAELDLNMTRSHSGGELESLARGRRSLGSLTIAEPAMIAECKTRTEVFEISRRLIDRTNANFLVWPPCVEVQRCSGCCNNRNVQCRPTQVQLRPVQVRKIEIVRKKPIFKKATVTLEDHLACKCETVAAARPVTRSPGGSQEQRAKTPQTRVTIRTVRVRRPPKGKHRKFKHTHDKTALKETLGA

SEQ ID NO: 254 - protein, 1133 aa, Homo sapiens
MDVLAEEFGNLTPEQLAAPIPTVEEKWRLLPAFLKVKGLVKQHIDSFNYFINVEIKKIMKANEKVTSDADPMWYLKYLNIYVGLPDVEESFNVTRPVSPHECRLRDMTYSAPITVDIEYTRGSQRIIRNALPIGRMPIMLRSSNCVLTGKTPAEFAKLNECPLDPGGYFIVKGVEKVILIQEQLSKNRIIVEADRKGAVGASVTSSTHEKKSRTNMAVKQGRFYLRHNTLSEDIPIVIIFKAMGVESDQEIVQMIGTEEHVMAAFGPSLEECQKAQIFTQMQALKYIGNKVRRQRMWGGGPKKTKIEEARELLASTILTHVPVKEFNFRAKCIYTAVMVRRVILAQGDNKVDDRDYYGNKRLELAGQLLSLLFEDLFKKFNSEMKKIADQVIPKQRAAQFDVVKHMRQDQITNGMVNAISTGNWSLKRFKMDRQGVTQVLSRLSYISALGMMTRISSQFEKTRKVSGPRSLQPSQWGMLCPSDTPEGEACGLVKNLALMTHITTDMEDGPIVKLASNLGVEDVNLLCGEELSYPNVFLVFLNGNILGVIRDHKKLVNTFRLMRRAGYINEFVSISTNLTDRCVYISSDGGRLCRPYIIVKKQKPAVTNKHMEELAQGYRNFEDFLHESLVEYLDVNEENDCNIALYEHTINKDTTHLEIEPFTLLGVCAGLIPYPHHNQSPRNTYQCAMGKQAMGTIGYNQRNRIDTLMYLLAYPQKPMVKTKTIELIEFEKLPAGQNATVAVMSYSGYDIEDALVLNKASLDRGFGRCLVYKNAKCTLKRYTNQTFDKVMGPMLDAATRKPIWRHEILDADGICSPGEKVENKQVLVNKSMPTVTQIPLEGSNVPQQPQYKDVPITYKGATDSYIEKVMISSNAEDAFLIKMLLRQTRRPEIGDKFSSRHGQKGVCGLIVPQEDMPFCDSGICPDIIMNPHGFPSRMTVGKLIELLAGKAGVLDGRFHYGTAFGGSKVKDVCEDLVRHGYNYLGKDYVTSGITGEPLEAYIYFGPVYYQKLKHMVLDKMHARARGPRAVLTRQPTEGRSRDGGLRLGEMERDCLIGYGASMLLLERLMISSDAFEVDVCGQCGLLGYSGWCHYCKSSCHVSSLRIPYACKLLFQELQSMNIIPRLKLSKYNE

SEQ ID NO: 255 - protein, 564 aa, Homo sapiens
MASTSTTIRSHSSSRRGFSANSARLPGVSRSGFSSISVSRSRGSGGLGGACGGAGFGSRSLYGLGGSKRISIGGGSCAISGGYGSRAGGSYGFGGAGSGFGFGGGAGIGFGLGGGAGLAGGFGGPGFPVCPPGGIQEVTVNQSLLTPLNLQIDPAIQRVRAEEREQIKTLNNKFASFIDKVRFLEQQNKVLDTKWTLLQEQGTKTVRQNLEPLFEQYINNLRRQLDSIVGERGRLDSELRNMQDLVEDLKNKYEDEINKRTAAENEFVTLKKDVDAAYMNKVELQAKADTLTDEINFLRALYDAELSQMQTHISDTSVVLSMDNNRNLDLDSIIAEVKAQYEEIAQRSRAEAESWYQTKYEELQVTAGRHGDDLRNTKQEIAEINRMIQRLRSEIDHVKKQCASLQAAIADAEQRGEMALKDAKNKLEGLEDALQKAKQDLARLLKEYQELMNVKLALDVEIATYRKLLEGEECRLNGEGVGQVNVSVVQSTISSGYGGASGVGSGLGLGGGSSYSYGSGLGIGGGFSSSSGRAIGGGLSSVGGGSSTIKYTTTSSSSRKSYKH

SEQ ID NO: 256 - protein, 217 aa, Homo sapiens [sequence omitted]

SEQ ID NO: 257 - protein, 1712 aa, Homo sapiens
MGRDQRAVAGPALRRWLLLGTVTVGFLAQSVLAGVKKFDVPCGGRDCSGGCQCYPEKGGRGQPGPVGPQGYNGPPGLQGFPGLQGRKGDKGERGAPGVTGPKGDVGARGVSGFPGADGIPGHPGQGGPRGRPGYDGCNGTQGDSGPQGPPGSEGFTGPPGPQGPKGQKGEPYALPKEERDRYRGEPGEPGLVGFQGPPGRPGHVGQMGPVGAPGRPGPPGPPGPKGQQGNRGLGFYGVKGEKGDVGQPGPNGIPSDTLHPIIAPTGVTFHPDQYKGEKGSEGEPGIRGISLKGEEGIMGFPGLRGYPGLSGEKGSPGQKGSRGLDGYQGPDGPRGPKGEAGDPGPPGLPAYSPHPSLAKGARGDPGFPGAQGEPGSQGEPGDPGLPGPPGLSIGDGDQRRGLPGEMGPKGFIGDPGIPALYGGPPGPDGKRGPPGPPGLPGPPGPDGFLFGLKGAKGRAGFPGLPGSPGARGPKGWKGDAGECRCTEGDEAIKGLPGLPGPKGFAGINGEPGRKGDRGDPGQHGLPGFPGLKGVPGNIGAPGPKGAKGDSRTITTKGERGQPGVPGVPGMKGDDGSPGRDGLDGFPGLPGPPGDGIKGPPGDPGYPGIPGTKGTPGEMGPPGLGLPGLKGQRGFPGDAGLPGPPGFLGPPGPAGTPGQIDCDTDVKRAVGGDRQEAIQPGCIGGPKGLPGLPGPPGPTGAKGLRGIPGFAGADGGPGPRGLPGDAGREGFPGPPGFIGPRGSKGAVGLPGPDGSPGPIGLPGPDGPPGERGLPGEVLGAQPGPRGDAGVPGQPGLKGLPGDRGPPGFRGSQGMPGMPGLKGQPGLPGPSGQPGLYGPPGLHGFPGAPGQEGPLGLPGIPGREGLPGDRGDPGDTGAPGPVGMKGLSGDRGDAGFTGEQGHPGSPGFKGIDGMPGTPGLKGDRGSPGMDGFQGMPGLKGRPGFPGSKGEAGFFGIPGLKGLAGEPGFKGSRGDPGPPGPPPVILPGMKDIKGEKGDEGPMGLKGYLGAKGIQGMPGIPGLSGIPGLPGRPGHIKGVKGDIGVPGIPGLPGFPGVAGPPGITGFPGFIGSRGDKGAPGRAGLYGEIGATGDFGDIGDTINLPGRPGLKGERGTTGIPGLKGFFGEKGTEGDIGFPGITGVTGVQGPPGLKGQTGFPGLTGPPGSQGELGRIGLPGGKGDDGWPGAPGLPGFPGLRGIRGLHGLPGTKGFPGSPGSDIHGDPGFPGPPGERGDPGEANTLPGPVGVPGQKGDQGAPGERGPPGSPGLQGFPGITPPSNISGAPGDKGAPGIFGLKGYRGPPGPPGSAALPGSKGDTGNPGAPGTPGTKGWAGDSGPQGRPGVFGLPGEKGPRGEQGFMGNTGPTGAVGDRGPKGPKGDPGFPGAPGTVGAPGIAGIPQKIAVQPGTVGPQGRRGPPGAPGEMGPQGPPGEPGFRGAPGKAGPQGRGGVSAVPGFRGDEGPIGHQGPIGQEGAPGRPGSPGLPGMPGRSVSIGYLLVKHSQTDQEPMCPVGMNKLWSGYSLLYFEGQEKAHNQDLGLAGSCLARFSTMPFLYCNPGDVCYYASRNDKSYWLSTTAPLPMMPVAEDEIKPYISRCSVCEAPAIAIAVHSQDVSIPHCPAGWRSLWIGYSFLMHTAAGDEGGGQSLVSPGSCLEDFRATPFIECNGGRGTCHYYANKYSFWLTTIPEQSFQGSPSADTLKAGLIRTHISRCQVCMKNL

SEQ ID NO: 258 - protein, 585 aa, Homo sapiens
MASPGSGFWSFGSEDGSGDSENPGTARAWCQVAQKFTGGIGNKLCALLYGDAEKPAESGGSQPPRAAARKAACACDQKPCSCSKVDVNYAFLHATDLLPACDGERPTLAFLQDVMNILLQYVVKSFDRSTKVIDFHYPNELLQEYNWELADQPQNLEEILMHCQTTLKYAIKTGHPRYFNQLSTGLDMVGLAADWLTSTANTNMFTYEIAPVFVLLEYVTLKKMREIIGWPGGSGDGIFSPGGAISNMYAMMIARFKMFPEVKEKGMAALPRLIAFTSEHSHFSLKKGAAALGIGTDSVILIKCDERGKMIPSDLERRILEAKQKGFVPFLVSATAGTTVYGAFDPLLAVADICKKYKIWMHVDAAWGGGLLMSRKHKWKLSGVERANSVTWNPHKMMGVPLQCSALLVREEGLMQNCNQMHASYLFQQDKHYDLSYDTGDKALQCGRHVDVFKLWLMWRAKGTTGFEAHVDKCLELAEYLYNIIKNREGYEMVFDGKPQHTNVCFWYIPPSLRTLEDNEERMSRLSKVAPVIKARMMEYGTTMVSYQPLGDKVNFFRMVISNPAATHQDIDFLIEEIERLGQDL

SEQ ID NO: 259 - protein, 698 aa, Homo sapiens
MMRSRSKSPRRPSPTARGANCDVELLKTTTRDREELKCMLEKYERHLAEIQGNVKVLKSERDKIFLLYEQAQEEITRLRREMMKSCKSPKSTTAHAILRRVETERDVAFTDLRRMTTERDSLRERLKIAQETAFNEKAHLEQRIEELECTVHNLDDERMEQMSNMTLMKETISTVEKEMKSLARKAMDTESELGRQKAENNSLRLLYENTEKDLSDTQRHLAKKKYELQLTQEKIMCLDEKIDNFTRQNIAQREEISILGGTLNDLAKEKECLQACLDKKSENIASLGESLAMKEKTISGMKNIIAEMEQASRQCTEALIVCEQDVSRMRRQLDETNDELAQIARERDILAHDNDNLQEQFAKAKQENQALSKKLNDTHNELNDIKQKVQDTNLEVNKLKNILKSEESENRQMMEQLRKANEDAENWENKARQSEADNNTLKLELITAEAEGNRLKEKVDSLNREVEQHLNAERSYKSQISTLHKSVVKMEEELQKVQFEKVSALADLSSTRELCIKLDSSKELLNRQLVAKDQEIEMRENELDSAHSEIELLRSQMANERISMQNLEALLVANRDKEYQSQIALQEKESEIQLLKEHLCLAENKMAIQSRDVAQFRNVVTQLEADLDITKRQLGTERFERERAVQELRRQNYSSNAYHMSSTMKPNTKCHSPERAHHRSPDRGLDRSLEENLCYRDF

SEQ ID NO: 260 - protein, 441 aa, Homo sapiens
MCVCQTMEVGQYGKNASRAGDRGVLLEPFIHQVGGHSSMMRYDDHTVCKPLISREQRFYESLPPEMKEFTPEYKGVVSVCFEGDSDGYINLVAYPYVESETVEQDDTTEREQPRRKHSRRSLHRSGSGSDHKEEKASLSLETSESSQEAKSPKVELHSHSEVPFQMLDGNSGLSSEKISHNPWSLRCHKQQLSRMRSESKDRKLYKFLLLENVVHHFKYPCVLDLKMGTRQHGDDASAEKAARQMRKCEQSTSATLGVRVCGMQVYQLDTGHYLCRNKYYGRGLSIEGFRNALYQYLHNGLDLRRDLFEPILSKLRGLKAVLERQASYRFYSSSLLVIYDGKECRAESCLDRRSEMRLKHLDMVLPEVASSCGPSTSPSNTSPEAGPSSQPKVDVRMIDFAHSTFKGFRDDPTVHDGPDRGYVFGLENLISIMEQMRDENQ

SEQ ID NO: 261 - protein, 1599 aa, Homo sapiens
MNKAPQSTGPPPAPSPGLPQPAFPPGQTAPVVFSTPQATQMNTPSQPRQHFYPSRAQPPSSAASRVQSAAPARPGPAAHVYPAGSQVMMIPSQISYPASQGAYYIPGQGRSTYVVPTQQYPVQPGAPGFYPGASPTEFGTYAGAYYPAQGVQQFPTGVAPTPVLMNQPPQIAPKRERKTIRIRDPNQGGKDITEEIMSGARTASTPTPPQTGGGLEPQANGETPQVAVIVRPDDRSQGAIIADRPGLPGPEHSPSESQPSSPSPTPSPSPVLEPGSEPNLAVLSIPGDTMTTIQMSVEESTPISRETGEPYRLSPEPTPLAEPILEVEVTLSKPVPESEFSSSPLQAPTPLASHTVEIHEPNGMVPSEDLEPEVESSPELAPPPACPSESPVPIAPTAQPEELLNGAPSPPAVDLSPVSEPEEQAKEVTASMAPPTIPSATPATAPSATSPAQEEEMEEEEEEEEGEAGEAGEAESEKGGEELLPPESTPIPANLSQNLEAAAATQVAVSVPKRRRKIKELNKKEAVGDLLDAFKEANPAVPEVENQPPAGSNPGPESEGSGVPPRPEEADETWDSKEDKIHNAENIQPGEQKYEYKSDQWKPLNLEEKKRYDREFLLGFQFIFASMQKPEGLPHISDVVLDKANKTPLRPLDPTRLQGINCGPDFTPSFANLGRTTLSTRGPPRGGPGGELPRGPAGLGPRRSQQGPRKEPRKIIATVLMTEDIKLNKAEKAWKPSSKRTAADKDRGEEDADGSKTQDLFRRVRSILNKLTPQMFQQLMKQVTQLAIDTEERLKGVIDLIFEKAISEPNFSVAYANMCRCLMALKVPTTEKPTVTVNFRKLLLNRCQKEFEKDKDDDEVFEKKQKEMDEAATAEERGRLKEELEEARDIARRRSLGNIKFIGELFKLKMLTEAIMHDCVVKLLKNHDEESLECLCRLLTTIGKDLDFEKAKPRMDQYFNQMEKIIKEKKTSSRIRFMLQDVLDLRGSNWVPRRGDQGPKTIDQIHKEAEMEEHREHIKVQQLMAKGSDKRRGGPPGPPISRGLPLVDDGGWNTVPISKGSRPIDTSRLTKITKPGSIDSNNQLFAPGGRLSWGKGSSGGSGAKPSDAASEAARPATSTLNRFSALQQAVPTESTDNRRVVQRSSLSRERGEKAGDRGDRLERSERGGDRGDRLDRARTPATKRSFSKEVEERSRERPSQPEGLRKAASLTEDRDRGRDAVKREAALPPVSPLKAALSEEELEKKSKAIIEEYLHLNDMKEAVQCVQELASPSLLFIFVRHGVESTLERSAIAREHMGQLLHQLLCAGHLSTAQYYQGLYEILELAEDMEIDIPHVWLYLAELVTPILQEGGVPMGELFREITKPLRPLGKAASLLLEILGLLCKSMGPKKVGTLWREAGLSWKEFLPEGQDIGAFVAEQKVEYTLGEESEAPGQRALPSEELNRQLEKLLKEGSSNQRVFDWIEANLSEQQIVSNTLVRALMTAVCYSAIIFETPLRVDVAVLKARAKLLQKYLCDEQKELQALYALQALVVTLEQPPNLLRMFFDALYDEDVVKEDAFYSWESSKDPAEQQGKGVALKSVTAFFKWLREAEEESDHN

SEQ ID NO: 262 - protein, 3267 aa, Homo sapiens
MQKARGTRGEDAGTRAPPSPGVPPKRAKVGAGGGAPVAVAGAPVFLRPLKNAAVCAGSDVRLRVVVSGTPQPSLRWFRDGQLLPAPAPEPSCLWLRRCGAQDAGVYSCMAQNERGRASCEAVLTVLEVGDSETAEDDISDVQGTQRLELRDDGAFSTPTGGSDTLVGTSLDTPPTSVTGTSEEQVSWWGSGQTVLEQEAGSGGGTRRLPGSPRQAQATGAGPRHLGVEPLVRASRANLVGASWGSEDSLSVASDLYGSAFSLYRGRALSIHVSVPQSGLRREEPDLQPQLASEAPRRPAQPPPSKSALLPPPSPRVGKRSPPGPPAQPAATPTSPHRRTQEPVLPEDTTTEEKRGKKSKSSGPSLAGTAESRPQTPLSEASGRLSALGRSPRLVRAGSRILDKLQFFEERRRSLERSDSPPAPLRPWVPLRKARSLEQPKSERGAPWGTPGASQEELRAPGSVAERRRLFQQKAASLDERTRQRSPASDLELRFAQELGRIRRSTSREELVRSHESLRATLQRAPSPREPGEPPLFSRPSTPKTSRAVSPAAAQPPSPSSAEKPGDEPGRPRSRGPAGRTEPGEGPQQEVRRRDQFPLTRSRAIQECRSPVPPPAADPPEARTKAPPGRKREPPAQAVRFLPWATPGLEGAAVPQTLEKNRAGPEAEKRLRRGPEEDGPWGPWDRRGARSQGKGRRARPTSPELESSDDSYVSAGEEPLEAPVFEIPLQNVVVAPGADVLLKCIITANPPPQVSWHKDGSALRSEGRLLLRAEGERHTLLLREARAADAGSYMATATNELGQATCAASLTVRPGGSTSPFSSPITSDEEYLSPPEEFPEPGETWPRTPTMKPSPSQNRRSSDTGSKAPPTFKVSLMDQSVREGQDVIMSIRVQGEPKPVVSWLRNRQPVRPDQRRFAEEAEGGLCRLRILAAERGDAGFYTCKAVNEYGARQCEARLEVRAHPESRSLAVLAPLQDVDVGAGEMALFECLVAGPTDVEVDWLCRGRLLQPALLKCKMHFDGRKCKLLLTSVHEDDSGVYTCKLSTAKDELTCSARLTVRPSLAPLFTRLLEDVEVLEGRAARFDCKISGTPPPVVTWTHFGCPMEESENLRLRQDGGLHSLHIAHVGSEDEGLYAVSAVNTHGQAHCSAQLYVEEPRTAASGPSSKLEKMPSIPEEPEQGELERLSIPDFLRPLQDLEVGLAKEAMLECQVTGLPYPTISWFHNGHRIQSSDDRRMTQYRDVHRLVFPAVGPQHAGVYKSVIANKLGKAACYAHLYVTDVVPGPPDGAPQVVAVTGRMVTLTWNPPRSLDMAIDPDSLTYTVQHQVLGSDQWTALVTGLREPGWAATGLRKGVQHIFRVLSTTVKSSSKPSPPSEPVQLLEHGPTLEEAPAMLDKPDIVYVVEGQPASVTVTFNHVEAQVVWRSCRGALLEARAGVYELSQPDDDQYCLRICRVSRRDMGALTCTARNRHGTQTCSVTLELAEAPRFESIMEDVEVGAGETARFAVVVEGKPLPDIMWYKDEVLLTESSHVSFVYEENECSLVVLSTGAQDGGVYTCTAQNLAGEVSCKAELAVHSAQTAMEVEGVGEDEDHRGRRLSDFYDIHQEIGRGAFSYLRRIVERSSGLEFAAKFIPSQAKPKASARREARLLARLQHDCVLYFHEAFERRRGLVIVTELCTEELLERIARKPTVCESEIRAYMRQVLEGIHYLHQSHVLHLDVKPENLLVWDGAAGEQQVRICDFGNAQELTPGEPQYCQYGTPEFVAPEIVNQSPVSGVTDIWPVGVVAFLCLTGISPFVGENDRTTLMNIRNYNVAFEETTFLSLSREARGFLIKVLVQDRLRPTAEETLEHPWFKTQAKGAEVSTDHLKLFLSRRRWQRSQISYKCHLVLRPIPELLRAPPERVWVTMPRRPPPSGGLSSSSDSEEEELEELPSVPRPLQPEFSGSRVSLTDIPTEDEALGTPETGAATPMDWQEQGRAPSQDQEAPSPEALPSPGQEPAAGASPRRGELRRGSSAESALPRAGPRELGRGLHKAASVELPQRRSPSPGATRLARGGLGEGEYAQRLQALRQRLLRGGPEDGKVSGLRGPLLESLGGRARDPRMARAASSEAAPHHQPPLENRGLQKSSSFSQGEAEPRGRHRRAGAPLEIPVARLGARRLQESPSLSALSEAQPSSPARPSAPKPSTPKSAEPSATTPSDAPQPPAPQPAQDKAPEPRPEPVRASKPAPPPQALQTLALPLTPYAQIIQSLQLSGHAQGPSQGPAAPPSEPKPHAAVFARVASPPPGAPEKRVPSAGGPPVLAEKARVPTVPPRPGSSLSSSIENLESEAVFEAKFKRSRESPLSLGLRLLSRSRSEERGPFRGAEEEDGIYRPSPAGTPLELVRRPERSRSVQDLRAVGEPGLVRRLSLSLSQRLRRTPPAQRHPAWEARGGDGESSEGGSSARGSPVLAMRRRLSFTLERLSSRLQRSGSSEDSGGASGRSTPLFGRLRRATSEGESLRRLGLPHNQLAAQAGATTPSAESLGSEASATSGSSAPGESRSRLRWGFSRPRKDKGLSPPNLSASVQEELGHQYVRSESDFPPVFHIKLKDQVLLEGEAATLLCLPAACPAPHISWMKDKKSLRSEPSVIIVSCKDGRQLLSIPRAGKRHAGLYECSATNVLGSITSSCTVAVARVPGKLAPPEVPQTYQDTALVLWKPGDSRAPCTYTLERRVDGESVWHPVSSGIPDCYYNVTHLPVGVTVRFRVACANRAGQGPFSNSSEKVFVRGTQDSSAVPSAAHQEAPVTSRPARARPPDSPTSLAPPLAPAAPTPPSVTVSPSSPPTPPSQALSSLKAVGPPPQTPPRRHRGLQAARPAEPTLPSTHVTPSEPKPFVLDTGTPIPASTPQGVKPVSSSTPVYVVTSFVSAPPAPEPPAPEPPPEPTKVTVQSLSPAKEVVSSPGSSPRSSPRPEGTTLRQGPPQKPYTFLEEKARGRFGVVRACRENATGRTFVAKIVPYAAEGKRRVLQEYEVLRTLHHERIMSLHEAYITPRYLVLIAESCGNRELLCGLSDRFRYSEDDVATYMVQLLQGLDYLHGHHVLHLDIKPDNLLLAPDNALKIVDFGSAQPYNPQALRPLGHRTGTLEFMAPEMVKGEPIGSATDIWGAGVLTYIMLSGRSPFYEPDPQETEARIVGGRFDAFQLYPNTSQSATLFLRKVLSVHPWSRPSLQDCLAHPWLQDAYLMKLRRQTLTFTTNRLKEFLGEQRRRRAEAATRHKVLLRSYPGGP

SEQ ID NO: 263 - protein, 267 aa, Homo sapiens
MTLGRRLACLFLACVLPALLLGGTALASEIVGGRRARPHAWPFMVSLQLRGGHFCGATLIAPNFVMSAAHCVANVNVRAVRVVLGAHNLSRREPTRQVFAVQRIFENGYDPVNLLNDIVILQLNGSATINANVQVAQLPAQGRRLGNGVQCLAMGWGLLGRNRGIASVLQELNVTVVTSLCRRSNVCTLVRGRQAGVCFGDSGSPLVCNGLIHGIASFVRGGCASGLYPDAFAPVAQFVNWIDSIIQRSEDNPCPHPRDPDPASRTH

SEQ ID NO: 264 - protein, 415 aa, Homo sapiens
MEDLCVANTLFALNLFKHLAKASPTQNLFLSPWSISSTMAMVYMGSRGSTEDQMAKVLQFNEVGANAVTPMTPENFTSCGFMQQIQKGSYPDAILQAQAADKIHSSFRSLSSAINASTGNYLLESVNKLFGEKSASFREEYIRLCQKYYSSEPQAVDFLECAEEARKKINSWVKTQTKGKIPNLLPEGSVDGDTRMVLVNAVYFKGKWKTPFEKKLNGLYPFRVNSAQRTPVQMMYLREKLNIGYIEDLKAQILELPYAGDVSMFLLLPDEIADVSTGLELLESEITYDKLNKWTSKDKMAEDEVEVYIPQFKLEEHYELRSILRSMGMEDAFNKGRANFSGMSERNDLFLSEVFHQAMVDVNEEGTEAAAGTGGVMTGRTGHGGPQFVADHPFLFLIMHKITNCILFFGRFSSP

SEQ ID NO: 265 - protein, 189 aa, Homo sapiens
MALSFSLLMAVLVLSYKSICSLGCDLPQTHSLGNRRALILLGQMGRISPFSCLKDRHDFRIPQEEFDGNQFQKAQAISVLHEMIQQTFNLFSTEDSSAAWEQSLLEKFSTELYQQLNDLEACVIQEVGVEETPLMNEDSILAVRKYFQRITLYLIERKYSPCAWEVVRAEIMRSLSFSTNLQKRLRRKD

SEQ ID NO: 266 - protein, 189 aa, Homo sapiens; identical to SEQ ID NO: 265

SEQ ID NO: 267 - protein, 561 aa, Homo sapiens
MADHNPDSDSTPRTLLRRVLDTADPRTPRRPRSARAGARRALLETASPRKLSGQTRTIARGRSHGARSVGRSAHIQASGHLEEQTPRTLLKNILLTAPESSILMPESVVKPVPAPQAVQPSRQESSCGSLELQLPELEPPTTLAPGLLAPGRRKQRLRLSVFQQGVDQGLSLSQEPQGNADASSLTRSLNLTFATPLQPQSVQRPGLARRPPARRAVDVGAFLRDLRDTSLAPPNIVLEDTQPFSQPMVGSPNVYHSLPCTPHTGAEDAEQAAGRKTQSSGPGLQKNSPGKPAQFLAGEAEEVNAFALGFLSTSSGVSGEDEVEPLHDGVEEAEKKMEEEGVSVSEMEATGAQGPSRVEEAEGHTEVTEAEGSQGTAEADGPGASSGDEDASGRAASPESASSTPESLQARRHHQFLEPAPAPGAAVLSSEPAEPLLVRHPPRPRTTGPRPRQDPHKAGLSHYVKLFSFYAKMPMERKALEMVEKCLDKYFQHLCDDLEVFAAHAGRKTVKPEDLELLMRRQGLVTDQVSLHVLVERHLPLEYRQLLIPCAYSGNSVFPAQ

SEQ ID NO: 268 - protein, 2000 aa, Homo sapiens
MKAADTVILWARSKNDQLRISFPPGLCWGDRMPDKDDIRLLPSALGVKKRKRGPKKQKENKPGKPRKRKKRDSEEEFGSERDEYREKSESGGSEYGTGPGRKRRRKHREKKEKKTKRRKKGEGDGGQKQVEQKSSATLLLTWGLEDVEHVFSEEDYHTLTNYKAFSQFMRPLIAKKNPKIPMSKMMTILGAKWREFSANNPFKGSAAAVAAAAAAAAAAVAEQVSAAVSSATPIAPSGPPALPPPPAADIQPPPIRRAKTKEGKGPGHKRRSKSPRVPDGRKKLRGKKMAPLKIKLGLLGGKRKKGGSYVFQSDEGPEPEAEESDLDSGSVHSASGRPDGPVRTKKLKRGRPGRKKKKVLGCPAVAGEEEVDGYETDHQDYCEVCQQGGEIILCDTCPRAYHLVCLDPELDRAPEGKWSCPHCEKEGVQWEAKEEEEEYEEEGEEEGEKEEEDDHMEYCRVCKDGGELLCCDACISSYHIHCLNPPLPDIPNGEWLCPRCTCPVLKGRVQKILHWRWGEPPVAVPAPQQADGNPDVPPPRPLQGRSEREFFVKWVGLSYWHCSWAKELQLEIFHLVMYRNYQRKNDMDEPPPLDYGSGEDDGKSDKRKVKDPHYAEMEEKYYRFGIKPEWMTVHRIINHSVDKKGNYHYLVKWRDLPYDQSTWEEDEMNIPEYEEHKQSYWRHRELIMGEDPAQPRKYKKKKKELQGDGPPSSPTNDPTVKYETQPRFITATGGTLHMYQLEGLNWLRFSWAQGTDTILADEMGLGKTIQTIVFLYSLYKEGHTKGPFLVSAPLSTIINWEREFQMWAPKFYVVTYTGDKDSRAIIRENEFSFEDNAIKGGKKAFKMKREAQVKFHVLLTSYELITIDQAALGSIRWACLVVDEAHRLKNNQSKFFRVLNGYKIDHKLLLTGTPLQNNLEELFHLLNFLTPERFNNLEGFLEEFADISKEDQIKKLHDLLGPHMLRRLKADVFKNMPAKTELIVRVELSPMQKKYYKYILTRNFEALNSRGGGNQVSLLNIMMDLKKCCNHPYLFPVAAMESPKLPSGAYEGGALIKSSGKLMLLQKMLRKLKEQGHRVLIFSQMTKMLDLLEDFLDYEGYKYERIDGGITGALRQEAIDRFNAPGAQQFCFLLSTRAGGLGINLATADTVIIFDSDWNPHNDIQAFSRAHRIGQANKVMIYRFVTRASVEERITQVAKRKMMLTHLVVRPGLGSKAGSMSKQELDDILKFGTEELFKDENEGENKEEDSSVIHYDNEAIARLLDRNQDATEDTDVQNMNEYLSSFKVAQYVVREEDKIEEIEREIIKQEENVDPDYWEKLLRHHYEQQQEDLARNLGKGKRVRKQVNYNDAAQEDQDNQSEYSVGSEEEDEDFDERPEGRRQSKRQLRNEKDKPLPPLLARVGGNIEVLGFNTRQRKAFLNAVMRWGMPPQDAFTTQWLVRDLRGKTEKEFKAYVSLFMRHLCEPGADGSETFADGVPREGLSRQQVLTRIGVMSLVKKKVQEFEHINGRWSMPELMPDPSADSKRSSRASSPTKTSPTTPEASATNSPCTSKPATPAPSEKGEGIRTPLEKEEAENQEEKPEKNSRIGEKMETEADAPSPAPSLGERLEPRKIPLEDEVPGVPGEMEPEPGYRGDREKSATESTPGERGEEKPLDGQEHRERPEGETGDLGKREDVKGDRELRPGPRDEPRSNGRREEKTEKPRFMFNIADGGFTELHTLWQNEERAAISSGKLNEIWHRRHDYWLLAGIVLHGYARWQDIQNDAQFAIINEPFKTEANKGNFLEMKNKFLARRFKLLEQALVIEEQLRRAAYLNLSQEPAHPAMALHARFAEAECLAESHQHLSKESLAGNKPANAVLHKVLNQLEELLSDMKADVTRLPATLSRIPPIAARLQMSERSILSRLASKGTEPHPTPAYPPGPYATPPGYGAAFSAAPVGALAAAGANYSQMPAGSFITAATNGPPVLVKKEKEMVGALVSDGLDRKEPRAGEVICIDD

SEQ ID NO: 269 - protein, 2214 aa, Homo sapiens
MGLAGVCALRRSAGYILVGGAGGQSAAAAARRYSEGEWASGGVRSFSRAAAAMAPIKVGDAIPAVEVFEGEPGNKVNLAELFKGKKGVLFGVPGAFTPGCSKTHLPGFVEQAEALKAKGVQVVACLSVNDAFVTGEWGRAHKAEGKVRLLADPTGAFGKETDLLLDDSLVSIFGNRRLKRFSMVVQDGIVKALNVEPDGTGLTCSLAPNIISQLMKAADTVILWARSKNDQLRISFPPGLCWGDRMPDKDDIRLLPSALGVKKRKRGPKKQKENKPGKPRKRKKRDSEEEFGSERDEYREKSESGGSEYGTGPGRKRRRKHREKKEKKTKRRKKGEGDGGQKQVEQKSSATLLLTWGLEDVEHVFSEEDYHTLTNYKAFSQFMRPLIAKKNPKIPMSKMMTILGAKWREFSANNPFKGSAAAVAAAAAAAAAAVAEQVSAAVSSATPIAPSGPPALPPPPAADIQPPPIRRAKTKEGKGPGHKRRSKSPRVPDGRKKLRGKKMAPLKIKLGLLGGKRKKGGSYVFQSDEGPEPEAEESDLDSGSVHSASGRPDGPVRTKKLKRGRPGRKKKKVLGCPAVAGEEEVDGYETDHQDYCEVCQQGGEIILCDTCPRAYHLVCLDPELDRAPEGKWSCPHCEKEGVQWEAKEEEEEYEEEGEEEGEKEEEDDHMEYCRVCKDGGELLCCDACISSYHIHCLNPPLPDIPNGEWLCPRCTCPVLKGRVQKILHWRWGEPPVAVPAPQQADGNPDVPPPRPLQGRSEREFFVKWVGLSYWHCSWAKELQLEIFHLVMYRNYQRKNDMDEPPPLDYGSGEDDGKSDKRKVKDPHYAEMEEKYYRFGIKPEWMTVHRIINHSVDKKGNYHYLVKWRDLPYDQSTWEEDEMNIPEYEEHKQSYWRHRELIMGEDPAQPRKYKKKKKELQGDGPPSSPTNDPTVKYETQPRFITATGGTLHMYQLEGLNWLRFSWAQGTDTILADEMGLGKTIQTIVFLYSLYKEGHTKGPFLVSAPLSTIINWEREFQMWAPKFYVVTYTGDKDSRAIIRENEFSFEDNAIKGGKKAFKMKREAQVKFHVLLTSYELITIDQAALGSIRWACLVVDEAHRLKNNQSKFFRVLNGYKIDHKLLLTGTPLQNNLEELFHLLNFLTPERFNNLEGFLEEFADISKEDQIKKLHDLLGPHMLRRLKADVFKNMPAKTELIVRVELSPMQKKYYKYILTRNFEALNSRGGGNQVSLLNIMMDLKKCCNHPYLFPVAAMESPKLPSGAYEGGALIKSSGKLMLLQKMLRKLKEQGHRVLIFSQMTKMLDLLEDFLDYEGYKYERIDGGITGALRQEAIDRFNAPGAQQFCFLLSTRAGGLGINLATADTVIIFDSDWNPHNDIQAFSRAHRIGQANKVMIYRFVTRASVEERITQVAKRKMMLTHLVVRPGLGSKAGSMSKQELDDILKFGTEELFKDENEGENKEEDSSVIHYDNEAIARLLDRNQDATEDTDVQNMNEYLSSFKVAQYVVREEDKIEEIEREIIKQEENVDPDYWEKLLRHHYEQQQEDLARNLGKGKRVRKQVNYNDAAQEDQDNQSEYSVGSEEEDEDFDERPEGRRQSKRQLRNEKDKPLPPLLARVGGNIEVLGFNTRQRKAFLNAVMRWGMPPQDAFTTQWLVRDLRGKTEKEFKAYVSLFMRHLCEPGADGSETFADGVPREGLSRQQVLTRIGVMSLVKKKVQEFEHINGRWSMPELMPDPSADSKRSSRASSPTKTSPTTPEASATNSPCTSKPATPAPSEKGEGIRTPLEKEEAENQEEKPEKNSRIGEKMETEADAPSPAPSLGERLEPRKIPLEDEVPGVPGEMEPEPGYRGDREKSATESTPGERGEEKPLDGQEHRERPEGETGDLGKREDVKGDRELRPGPRDEPRSNGRREEKTEKPRFMFNIADGGFTELHTLWQNEERAAISSGKLNEIWHRRHDYWLLAGIVLHGYARWQDIQNDAQFAIINEPFKTEANKGNFLEMKNKFLARRFKLLEQALVIEEQLRRAAYLNLSQEPAHPAMALHARFAEAECLAESHQHLSKESLAGNKPANAVLHKVLNQLEELLSDMKADVTRLPATLSRIPPIAARLQMSERSILSRLASKGTEPHPTPAYPPGPYATPPGYGAAFSAAPVGALAAAGANYSQMPAGSFITAATNGPPVLVKKEKEMVGALVSDGLDRKEPRAGEVICIDD

SEQ ID NO: 270 - protein, 2813 aa, Homo sapiens
MKLNPQQAPLYGDCVVTVLLAEEDKAEDDVVFYLVFLGSTLRHCTSTRKVSSDTLETIAPGHDCCETVKVQLCASKEGLPVFVVAEEDFHFVQDEAYDAAQFLATSAGNQQALNFTRFLDQSGPPSGDVNSLDKKLVLAFRHLKLPTEWNVLGTDQSLHDAGPRETLMHFAVRLGLLRLTWFLLQKPGGRGALSIHNQEGATPVSLALERGYHKLHQLLTEENAGEPDSWSSLSYEIPYGDCSVRHHRELDIYTLTSESDSHHEHPFPGDGCTGPIFKLMNIQQQLMKTNLKQMDSLMPLMMTAQDPSSAPETDGQFLPCAPEPTDPQRLSSSEETESTQCCPGSPVAQTESPCDLSSIVEEENTDRSCRKKNKGVERKGEEVEPAPIVDSGTVSDQDSCLQSLPDCGVKGTEGLSSCGNRNEETGTKSSGMPTDQESLSSGDAVLQRDLVMEPGTAQYSSGGELGGISTTNVSTPDTAGEMEHGLMNPDATVWKNVLQGGESTKERFENSNIGTAGASDVHVTSKPVDKISVPNCAPAASSLDGNKPAESSLAFSNEETSTEKTAETETSRSREESADAPVDQNSVVIPAAAKDKISDGLEPYTLLAAGIGEAMSPSDLALLGLEEDVMPHQNSETNSSHAQSQKGKSSPICSTTGDDKLCADSACQQNTVTSSGDLVAKLCDNIVSESESTTARQPSSQDPPDASHCEDPQAHTVTSDPVRDTQERADFCPFKVVDNKGQRKDVKLDKPLTNMLEVVSHPHPVVPKMEKELVPDQAVISDSTFSLANSPGSESVTKDDALSFVPSQKEKGTATPELHTATDYRDGPDGNSNEPDTRPLEDRAVGLSTSSTAAELQHGMGNTSLTGLGGEHEGPAPPAIPEALNIKGNTDSSLQSVGKATLALDSVLTEEGKLLVVSESSAAQEQDKDKAVTCSSIKENALSSGTLQEEQRTPPPGQDTQQFHEKSISADCAKDKALQLSNSPGASSAFLKAETEHNKEVAPQVSLLTQGGAAQSLVPPGASLATESRQEALGAEHNSSALLPCLLPDGSDGSDALNCSQPSPLDVGVKNTQSQGKTSACEVSGDVTVDVTGVNALQGMAEPRRENISHNTQDILIPNVLLSQEKNAVLGLPVALQDKAVTDPQGVGTPEMIPLDWEKGKLEGADHSCTMGDAEEAQIDDEAHPVLLQPVAKELPTDMELSAHDDGAPAGVREVMRAPPSGRERSTPSLPCMVSAQDAPLPKGADLIEEAASRIVDAVIEQVKAAGALLTEGEACHMSLSSPELGPLTKGLESAFTEKVSTFPPGESLPMGSTPEEATGSLAGCFAGREEPEKIILPVQGPEPAAEMPDVKAEDEVDFRASSISEEVAVGSIAATLKMKQGPMTQAINRENWCTIEPCPDAASLLASKQSPECENFLDVGLGRECTSKQGVLKRESGSDSDLFHSPSDDMDSIIFPKPEEEHLACDITGSSSSTDDTASLDRHSSHGSDVSLSQILKPNRSRDRQSLDGFYSHGMGAEGRESESEPADPGDVEEEEMDSITEVPANCSVLRSSMRSLSPFRRHSWGPGKNAASDAEMNHRSSMRVLGDVVRRPPIHRRSFSLEGLTGGAGVGNKPSSSLEVSSANAEELRHPFSGEERVDSLVSLSEEDLESDQREHRMFDQQICHRSKQQGFNYCTSAISSPLTKSISLMTISHPGLDNSRPFHSTFHNTSANLTESITEENYNFLPHSPSKKDSEWKSGTKVSRTFSYIKNKMSSSKKSKEKEKEKDKIKEKEKDSKDKEKDKKTVNGHTFSSIPVVGPISCSQCMKPFTNKDAYTCANCSAFVHKGCRESLASCAKVKMKQPKGSLQAHDTSSLPTVIMRNKPSQPKERPRSAVLLVDETATTPIFANRRSQQSVSLSKSVSIQNITGVGNDENMSNTWKFLSHSTDSLNKISKVNESTESLTDEGVGTDMNEGQLLGDFEIESKQLEAESWSRIIDSKFLKQQKKDVVKRQEVIYELMQTEFHHVRTLKIMSGVYSQGMMADLLFEQQMVEKLFPCLDELISIHSQFFQRILERKKESLVDKSEKNFLIKRIGDVLVNQFSGENAERLKKTYGKFCGQHNQSVNYFKDLYAKDKRFQAFVKKKMSSSVVRRLGIPECILLVTQRITKYPVLFQRILQCTKDNEVEQEDLAQSLSLVKDVIGAVDSKVASYEKKVRLNEIYTKTDSKSIMRMKSGQMFAKEDLKRKKLVRDGSVFLKNAAGRLKEVQAVLLTDILVFLQEKDQKYIFASLDQKSTVISLKKLIVREVAHEEKGLFLISMGMTDPEMVEVHASSKEERNSWIQIIQDTINTLNRDEDEGIPSENEEEKKMLDTRARELKEQLHQKDQKILLLLEEKEMIFRDMAECSTPLPEDCSPTHSPRVLFRSNTEEALKGGPLMKSAINEVEILQGLVSGNLGGTLGPTVSSPIEQDVVGPVSLPRRAETFGGFDSHQMNASKGGEKEEGDDGQDLRRTESDSGLKKGGNANLVFMLKRNSEQVVQSVVHLYELLSALQGVVLQQDSYIEDQKLVLSERALTRSLSRPSSLIEQEKQRSLEKQRQDLANLQKQQAQYLEEKRRREREWEARERELREREALLAQREEEVQQGQQDLEKEREELQQKKGTYQYDLERLRAAQKQLEREQEQLRREAERLSQRQTERDLCQVSHPHTKLMRIPSFFPSPEEPPSPSAPSIAKSGSLDSELSVSPKRNSISRTHKDKGPFHILSSTSQTNKGPEGQSQAPASTSASTRLFGLTKPKEKKEKKKKNKTSRSQPGDGPASEVSAEGEEIFC

SEQ ID NO: 271 - protein, 282 aa, Homo sapiens
MAVPETRPNHTIYINNLNEKIKKDELKKSLYAIFSQFGQILDILVSRSLKMRGQAFVIFKEVSSATNALRSMQGFPFYDKPMRIQYAKTDSDIIAKMKGTFVERDRKREKRKPKSQETPATKKAVQGGGATPVVGAVQGPVPGMPPMTQAPRIMHHMPGQPPYMPPPGMIPPPGLAPGQIPPGAMPPQQLMPGQMPPAQPLSENPPNHILFLTNLPEETNELMLSMLFNQFPGFKEVRLVPGRHDIAFVEFDNEVQAGAARDALQGFKITQNNAMKISFAKK

SEQ ID NO: 272 - protein, 359 aa, Homo sapiens
METQLSNGPTCNNTANGPTTINNNCSSPVDSGNTEDSKTNLIVNYLPQNMTQEELKSLFGSIGEIESCKLVRDKITGQSLGYGFVNYIDPKDAEKAINTLNGLRLQTKTIKVSYARPSSASIRDANLYVSGLPKTMTQKELEQLFSQYGRIITSRILVDQVTGISRGVGFIRFDKRIEAEEAIKGLNGQKPPGATEPITVKFANNPSQKTNQAILSQLYQSPNRRYPGPLAQQAQRFRLDNLLNMAYGVKRFSPMTIDGMTSLAGINIPGHPGTGWCIFVYNLAPDADESILWQMFGPFGAVTNVKVIRDFNTNKCKGFGFVTMTNYDEAAMAIASLNGYRLGDRVLQVSFKTNKTHKA

SEQ ID NO: 273 - protein, 367 aa, Homo sapiens
MVTQILGAMESQVGGGPAGPALPNGPLLGTNGATDDSKTNLIVNYLPQNMTQDEFKSLFGSIGDIESCKLVRDKITGQSLGYGFVNYSDPNDADKAINTLNGLKLQTKTIKVSYARPSSASIRDANLYVSGLPKTMSQKEMEQLFSQYGRIITSRILVDQVTGVSRGVGFIRFDKRIEAEEAIKGLNGQKPLGAAEPITVKFANNPSQKTGQALLTHLYQSSARRYAGPLHHQTQRFRLDNLLNMAYGVKSPLSLIARFSPIAIDGMSGLAGVGLSGGAAGAGWCIFVYNLSPEADESVLWQLFGPFGAVTNVKVIRDFTTNKCKGFGFVTMTNYDEAAMAIASLNGYRLGERVLQVSFKTSKQHKA

SEQ ID NO: 274 - protein, 1744 aa, Homo sapiens
MRLLWGLIWASSFFTLSLQKPRLLLFSPSVVHLGVPLSVGVQLQDVPRGQVVKGSVFLRNPSRNNVPCSPKVDFTLSSERDFALLSLQVPLKDAKSCGLHQLLRGPEVQLVAHSPWLKDSLSRTTNIQGINLLFSSRRGHLFLQTDQPIYNPGQRVRYRVFALDQKMRPSTDTITVMVENSHGLRVRKKEVYMPSSIFQDDFVIPDISEPGTWKISARFSDGLESNSSTQFEVKKYVLPNFEVKITPGKPYILTVPGHLDEMQLDIQARYIYGKPVQGVAYVRFGLLDEDGKKTFFRGLESQTKLVNGQSHISLSKAEFQDALEKLNMGITDLQGLRLYVAAAIIESPGGEMEEAELTSWYFVSSPFSLDLSKTKRHLVPGAPFLLQALVREMSGSPASGIPVKVSATVSSPGSVPEVQDIQQNTDGSGQVSIPIIIPQTISELQLSVSAGSPHPAIARLTVAAPPSGGPGFLSIERPDSRPPRVGDTLNLNLRAVGSGATFSHYYYMILSRGQIVFMNREPKRTLTSVSVFVDHHLAPSFYFVAFYYHGDHPVANSLRVDVQAGACEGKLELSVDGAKQYRNGESVKLHLETDSLALVALGALDTALYAAGSKSHKPLNMGKVFEAMNSYDLGCGPGGGDSALQVFQAAGLAFSDGDQWTLSRKRLSCPKEKTTRKKRNVNFQKAINEKLGQYASPTAKRCCQDGVTRLPMMRSCEQRAARVQQPDCREPFLSCCQFAESLRKKSRDKGQAGLQRALEILQEEDLIDEDDIPVRSFFPENWLWRVETVDRFQILTLWLPDSLTTWEIHGLSLSKTKGLCVATPVQLRVFREFHLHLRLPMSVRRFEQLELRPVLYNYLDKNLTVSVHVSPVEGLCLAGGGGLAQQVLVPAGSARPVAFSVVPTAAAAVSLKVVARGSFEFPVGDAVSKVLQIEKEGAIHREELVYELNPLDHRGRTLEIPGNSDPNMIPDGDFNSYVRVTASDPLDTLGSEGALSPGGVASLLRLPRGCGEQTMIYLAPTLAASRYLDKTEQWSTLPPETKDHAVDLIQKGYMRIQQFRKADGSYAAWLSRDSSTWLTAFVLKVLSLAQEQVGGSPEKLQETSNWLLSQQQADGSFQDPCPVLDRSMQGGLVGNDETVALTAFVTIALHHGLAVFQDEGAEPLKQRVEASISKANSFLGEKASAGLLGAHAAAITAYALTLTKAPVDLLGVAHNNLMAMAQETGDNLYWGSVTGSQSNAVSPTPAPRNPSDPMPQAPALWIETTAYALLHLLLHEGKAEMADQASAWLTRQGSFQGGFRSTQDTVIALDALSAYWIASHTTEERGLNVTLSSTGRNGFKSHALQLNNRQIRGLEEELQFSLGSKINVKVGGNSKGTLKVLRTYNVLDMKNTTCQDLQIEVTVKGHVEYTMEANEDYEDYEYDELPAKDDPDAPLQPVTPLQLFEGRRNRRRREAPKVVEEQESRVHYTVCIWRNGKVGLSGMAIADVTLLSGFHALRADLEKLTSLSDRYVSHFETEGPHVLLYFDSVPTSRECVGFEAVQEVPVGLVQPASATLYDYYNPERRCSVFYGAPSKSRLLATLCSAEVCQCAEGKCPRQRRALERGLQDEDGYRMKFACYYPRVEYGFQVKVLREDSRAAFRLFETKITQVLHFTKDVKAAANQMRNFLVRASCRLRLEPGKEYLIMGLDGATYDLEGHPQYLLDSNSWIEEMPSERLCRSTRQRAACAQLNDFLQEYGTQGCQV

SEQ ID NO: 275 - protein, 109 aa, Homo sapiens
MNPALGNQTDVAGLFLANSSEALERAVRCCTQASVVTDDGFAEGGPDERSLYIMRVVQIAVMCVLSLTVVFGIFFLGCNLLIKSEGMINFLVKDRRPSKEVEAVVVGPY

SEQ ID NO: 276 - protein, 90 aa, Homo sapiens
MKFLAVLVLLGVSIFLVSAQNPTTAAPADTYPATGPADDEAPDAETTAAATTATTAAPTTATTAASTTARKDIPVLPKWVGDLPNGRVCP

SEQ ID NO: 277 - protein, 430 aa, Homo sapiens
MKPSLLCRPLSCFLMLLPWPLATLTSTTLWQCPPGEEPDLDPGQGTLCRPCPPGTFSAAWGSSPCQPHARCSLWRRLEAQVGMATRDTLCGDCWPGWFGPWGVPRVPCQPCSWAPLGTHGCDEWGRRARRGVEVAAGASSGGETRQPGNGTRAGGPEETAAQYAVIAIVPVFCLMGLLGILVCNLLKRKGYHCTAHKEVGPGPGGGGSGINPAYRTEDANEDTIGVLVRLITEKKENAAALEELLKEYHSKQLVQTSHRPVSKLPPAPPNVPHICPHRHHLHTVQGLASLSGPCCSRCSQKKWPEVLLSPEAVAATTPVPSLLPNPTRVPKAGAKAGRQGEITILSVGRFRVARIPEQRTSSMVSEVKTITEAGPSWGDLPDSPQPGLPPEQQALLGSGGSRTKWLKPPAENKAEENRYVVRLSESNLVI

SEQ ID NO: 278 - protein, 388 aa, Homo sapiens
MAGCCAALAAFLFEYDTPRIVLIRSRKVGLMNRAVQLLILAYVIGWVFVWEKGYQETDSVVSSVTTKVKGVAVTNTSKLGFRIWDVADYVIPAQEENSLFVMTNVILTMNQTQGLCPEIPDATTVCKSDASCTAGSAGTHSNGVSTGRCVAFNGSVKTCEVAAWCPVEDDTHVPQPAFLKAAENFTLLVKNNIWYPKFNFSKRNILPNITTTYLKSCIYDAKTDPFCPIFRLGKIVENAGHSFQDMAVEGGIMGIQVNWDCNLDRAASLCLPRYSFRRLDTRDVEHNVSPGYNFRFAKYYRDLAGNEQRTLIKAYGIRFDIIVFGKAGKFDIIPTMINIGSGLALLGMATVLCDIIVLYCMKKRLYYREKKYKYVEDYEQGLASELDQ

SEQ ID NO: 279 - protein, 445 aa, Homo sapiens
MAEYDLTTRIAHFLDRHLVFPLLEFLSVKEIYNEKELLQGKLDLLSDTNMVDFAMDVYKNLYSDDIPHALREKRTTVVAQLKQLQAETEPIVKMFEDPETTRQMQSTRDGRMLFDYLADKHGFRQEYLDTLYRYAKFQYECGNYSGAAEYLYFFRVLVPATDRNALSSLWGKLASEILMQNWDAAMEDLTRLKETIDNNSVSSPLQSLQQRTWLIHWSLFVFFNHPKGRDNIIDLFLYQPQYLNAIQTMCPHILRYLTTAVITNKDVRKRRQVLKDLVKVIQQESYTYKDPITEFVECLYVNFDFDGAQKKLRECESVLVNDFFLVACLEDFIENARLFIFETFCRIHQCISINMLADKLNMTPEEAERWIVNLIRNARLDAKIDSKLGHVVMGNNAVSPYQQVIEKTKSLSFRSQMLAMNIEKKLNQNSRSEAPNWATQDSGFY

SEQ ID NO: 280 - protein, 1255 aa, Homo sapiens
MTPGTQSPFFLLLLLTVLTVVTGSGHASSTPGGEKETSATQRSSVPSSTEKNAVSMTSSVLSSHSPGSGSSTTQGQDVTLAPATEPASGSAATWGQDVTSVPVTRPALGSTTPPAHDVTSAPDNKPAPGSTAPPAHGVTSAPDTRPAPGSTAPPAHGVTSAPDTRPAPGSTAPPAHGVTSAPDTRPAPGSTAPPAHGVTSAPDTRPAPGSTAPPAHGVTSAPDTRPAPGSTAPPAHGVTSAPDTRPAPGSTAPPAHGVTSAPDTRPAPGSTAPPAHGVTSAPDTRPAPGSTAPPAHGVTSAPDTRPAPGSTAPPAHGVTSAPDTRPAPGSTAPPAHGVTSAPDTRPAPGSTAPPAHGVTSAPDTRPAPGSTAPPAHGVTSAPDTRPAPGSTAPPAHGVTSAPDTRPAPGSTAPPAHGVTSAPDTRPAPGSTAPPAHGVTSAPDTRPAPGSTAPPAHGVTSAPDTRPAPGSTAPPAHGVTSAPDTRPAPGSTAPPAHGVTSAPDTRPAPGSTAPPAHGVTSAPDTRPAPGSTAPPAHGVTSAPDTRPAPGSTAPPAHGVTSAPDTRPAPGSTAPPAHGVTSAPDTRPAPGSTAPPAHGVTSAPDTRPAPGSTAPPAHGVTSAPDTRPAPGSTAPPAHGVTSAPDTRPAPGSTAPPAHGVTSAPDTRPAPGSTAPPAHGVTSAPDTRPAPGSTAPPAHGVTSAPDTRPAPGSTAPPAHGVTSAPDTRPAPGSTAPPAHGVTSAPDTRPAPGSTAPPAHGVTSAPDTRPAPGSTAPPAHGVTSAPDTRPAPGSTAPPAHGVTSAPDTRPAPGSTAPPAHGVTSAPDTRPAPGSTAPPAHGVTSAPDTRPAPGSTAPPAHGVTSAPDTRPAPGSTAPPAHGVTSAPDTRPAPGSTAPPAHGVTSAPDTRPAPGSTAPPAHGVTSAPDTRPAPGSTAPPAHGVTSAPDNRPALGSTAPPVHNVTSASGSASGSASTLVHNGTSARATTTPASKSTPFSIPSHHSDTPTTLASHSTKTDASSTHHSSVPPLTSSNHSTSPQLSTGVSFFFLSFHISNLQFNSSLEDPSTDYYQELQRDISEMFLQIYKQGGFLGLSNIKFRPGSVVVQLTLAFREGTINVHDVETQFNQYKTEAASRYNLTISDVSVSDVPFPFSAQSGAGVPGWGIALLVLVCVLVALAIVYLIALAVCQCRRKNYGQLDIFPARDTYHPMSEYPTYHTHGRYVPPSSTDRSPYEKVSAGNGGSSLSYTNPAVAATSANL

SEQ ID NO: 281 - protein, 293 aa, Homo sapiens
MATFSGPAGPILSLNPQEDVEFQKEVAQVRKRITQRKKQEQLTPGVVYVRHLPNLLDETQIFSYFSQFGTVTRFRLSRSKRTGNSKGYAFVEFESEDVAKIVAETMNNYLFGERLLECHFMPPEKVHKELFKDWNIPFKQPSYPSVKRYNRNRTLTQKLRMEERFKKKERLLRKKLAKKGIDYDFPSLILQKTESISKTNRQTSTKGQVLRKKKKKVSGTLDTPEKTVDSQGPTPVCTPTFLERRKSQVAELNDDDKDDEIVFKQPISCVKEEIQETQTPTHSRKKRRRSSNQ

SEQ ID NO: 282 - protein, 257 aa, Homo sapiens
MEACVSSLLVLALGALSVGSSFGTQIIGGREVIPHSRPYMASLQRNGSHLCGGVLVHPKWVLTAAHCLAQRMAQLRLVLGLHTLDSPGLTFHIKAAIQHPRYKPVPALENDLALLQLDGKVKPSRTIRPLALPSKRQVVAAGTRCSMAGWGLTHQGGRLSRVLRELDLQVLDTRMCNNSRFWNGSLSPSMVCLAADSKDQAPCKGDSGGPLVCGKGRVLARVLSFSSRVCTDIFKPPVATAVAPYVSWIRKVTGRSA

SEQ ID NO: 283 - protein, 625 aa, Homo sapiens
MIFLYQVVHFILFTSVSGECVTQLLKDTCFEGGDITTVFTPSAKYCQVVCTYHPRCLLFTFTAESPSEDPTRWFTCVLKDSVTETLPRVNRTAAISGYSFKQCSHQISACNKDIYVDLDMKGINYNSSVAKSAQECQERCTDDVHCHFFTYATRQFPSLEHRNICLLKHTQTGTPTRITKLDKVVSGFSLKSCALSNLACIRDIFPNTVFADSNIDSVMAPDAFVCGRICTHHPGCLFFTFFSQEWPKESQRNLCLLKTSESGLPSTRIKKSKALSGFSLQSCRHSIPVFCHSSFYHDTDFLGEELDIVAAKSHEACQKLCTNAVRCQFFTYTPAQASCNEGKGKCYLKLSSNGSPTKILHGRGGISGYTLRLCKMDNECTTKIKPRIVGGTASVRGEWPWQVTLHTTSPTQRHLCGGSIIGNQWILTAAHCFYGVESPKILRVYSGILNQSEIKEDTSFFGVQEIIIHDQYKMAESGYDIALLKLETTVNYTDSQRPICLPSKGDRNVIYTDCWVTGWGYRKLRDKIQNTLQKAKIPLVTNEECQKRYRGHKITHKMICAGYREGGKDACKGDSGGPLSCKHNEVWHLVGITSWGEGCAQRERPGVYTNVVEYVDWILEKTQAV

SEQ ID NO: 284 - protein, 609 aa, Homo sapiens
MKWVESIFLIFLLNFTESRTLHRNEYGIASILDSYQCTAEISLADLATIFFAQFVQEATYKEVSKMVKDALTAIEKPTGDEQSSGCLENQLPAFLEELCHEKEILEKYGHSDCCSQSEEGRHNCFLAHKKPTPASIPLFQVPEPVTSCEAYEEDRETFMNKFIYEIARRHPFLYAPTILLWAARYDKIIPSCCKAENAVECFQTKAATVTKELRESSLLNQHACAVMKNFGTRTFQAITVTKLSQKFTKVNFTEIQKLVLDVAHVHEHCCRGDVLDCLQDGEKIMSYICSQQDTLSNKITECCKLTTLERGQCIIHAENDEKPEGLSPNLNRFLGDRDFNQFSSGEKNIFLASFVHEYSRRHPQLAVSVILRVAKGYQELLEKCFQTENPLECQDKGEEELQKYIQESQALAKRSCGLFQKLGEYYLQNAFLVAYTKKAPQLTSSELMAITRKMAATAATCCQLSEDKLLACGEGAADIIIGHLCIRHEMTPVNPGVGQCCTSSYANRRPCFSSLVVDETYVPPAFSDDKFIFHKDLCQAQGVALQTMKQEFLINLVKQKPQITEEQLEAVIADFSGLLEKCCQGQEQEVCFAEEGQKLISKTRAALGV

SEQ ID NO: 285 - protein, 451 aa, Homo sapiens
MNLEGGGRGGEFGMSAVSCGNGKLRQWLIDQIDSGKYPGLVWENEEKSIFRIPWKHAGKQDYNREEDAALFKAWALFKGKFREGIDKPDPPTWKTRLRCALNKSNDFEELVERSQLDISDPYKVYRIVPEGAKKGAKQLTLEDPQMSMSHPYTMTTPYPSLPAQQVHNYMMPPLDRSWRDYVPDQPHPEIPYQCPMTFGPRGHHWQGPACENGCQVTGTFYACAPPESQAPGVPTEPSIRSAEALAFSDCRLHICLYYREILVKELTTSSPEGCRISHGHTYDASNLDQVLFPYPEDNGQRKNIEKLLSHLERGVVLWMAPDGLYAKRLCQSRIYWDGPLALCNDRPNKLERDQTCKLFDTQQFLSELQAFAHHGRSLPRFQVTLCFGEEFPDPQRQRKLITAHVEPLLARQLYYFAQQNSGHFLRGYDLPEHISNPEDYHRSIRHSSIQE

SEQ ID NO: 286 - protein, 1074 aa, Homo sapiens
MSLKNEPRVNTSALQKIAADMSNIIENLDTRELHFEGEEVDYDVSPSDPKIQEVYIPFSAIYNTQGFKEPNIQTYLSGCPIKAQVLEVERFTSTTRVPSINLYTIELTHGEFKWQVKRKFKHFQEFHRELLKYKAFIRIPIPTRRHTFRRQNVREEPREMPSLPRSSENMIREEQFLGRRKQLEDYLTKILKMPMYRNYHATTEFLDISQLSFIHDLGPKGIEGMIMKRSGGHRIPGLNCCGQGRACYRWSKRWLIVKDSFLLYMKPDSGAIAFVLLVDKEFKIKVGKKETETKYGIRIDNLSRTLILKCNSYRHARWWGGAIEEFIQKHGTNFLKDHRFGSYAAIQENALAKWYVNAKGYFEDVANAMEEANEEIFITDWWLSPEIFLKRPVVEGNRWRLDCILKRKAQQGVRIFIMLYKEVELALGINSEYTKRTLMRLHPNIKVMRHPDHVSSTVYLWAHHEKLVIIDQSVAFVGGIDLAYGRWDDNEHRLTDVGSVKRVTSGPSLGSLPPAAMESMESLRLKDKNEPVQNLPIQKSIDDVDSKLKGIGKPRKFSKFSLYKQLHRHHLHDADSISSIDSTSSYFNHYRSHHNLIHGLKPHFKLFHPSSESEQGLTRPHADTGSIRSLQTGVGELHGETRFWHGKDYCNFVFKDWVQLDKPFADFIDRYSTPRMPWHDIASAVHGKAARDVARHFIQRWNFTKIMKSKYRSLSYPFLLPKSQTTAHELRYQVPGSVHANVQLLRSAADWSAGIKYHEESIHAAYVHVIENSRHYIYIENQFFISCADDKVVFNKIGDAIAQRILKAHRENQKYRVYVVIPLLPGFEGDISTGGGNALQAIMHFNYRTMCRGENSILGQLKAELGNQWINYISFCGLRTHAELEGNLVTELIYVHSKLLIADDNTVIIGSANINDRSMLGKRDSEMAVIVQDTETVPSVMDGKEYQAGRFARGLRLQCFRVVLGYLDDPSEDIQDPVSDKFFKEVWVSTAARNATIYDKVFRCLPNDEVHNLIQLRDFINKPVLAKEDPIRAEEELKKIRGFLVQFPFYFLSEESLLPSVGTKEAIVPMEVWT

SEQ ID NO: 287 - protein, 1636 aa, Homo sapiens
MEAVPRMPMIWLDLKEAGDFHFQPAVKKFVLKNYGENPEAYNEELKKLELLRQNAVRVPRDFEGCSVLRKYLGQLHYLQSRVPMGSGQEAAVPVTWTEIFSGKSVAHEDIKYEQACILYNLGALHSMLGAMDKRVSEEGMKVSCTHFQCAAGAFAYLREHFPQAYSVDMSRQILTLNVNLMLGQAQECLLEKSMLDNRKSFLVARISAQVVDYYKEACRALENPDTASLLGRIQKDWKKLVQMKIYYFAAVAHLHMGKQAEEQQKFGERVAYFQSALDKLNEAIKLAKGQPDTVQDALRFTMDVIGGKYNSAKKDNDFIYHEAVPALDTLQPVKGAPLVKPLPVNPTDPAVTGPDIFAKLVPMAAHEASSLYSEEKAKLLREMMAKIEDKNEVLDQFMDSMQLDPETVDNLDAYSHIPPQLMEKCAALSVRPDTVRNLVQSMQVLSGVFTDVEASLKDIRDLLEEDELLEQKFQEAVGQAGAISITSKAELAEVRREWAKYMEVHEKASFTNSELHRAMNLHVGNLRLLSGPLDQVRAALPTPALSPEDKAVLQNLKRILAKVQEMRDQRVSLEQQLRELIQKDDITASLVTTDHSEMKKLFEEQLKKYDQLKVYLEQNLAAQDRVLCALTEANVQYAAVRRVLSDLDQKWNSTLQTLVASYEAYEDLMKKSQEGRDFYADLESKVAALLERTQSTCQAREAARQQLLDRELKKKPPPRPTAPKPLLPRREESEAVEAGDPPEELRSLPPDMVAGPRLPDTFLGSATPLHFPPSPFPSSTGPGPHYLSGPLPPGTYSGPTQLIQPRAPGPHAMPVAPGPALYPAPAYTPELGLVPRSSPQHGVVSSPYVGVGPAPPVAGLPSAPPPQFSGPELAMAVRPATTTVDSIQAPIPSHTAPRPNPTPAPPPPCFPVPPPQPLPTPYTYPAGAKQPIPAQHHFSSGIPAGFPAPRIGPQPQPHPQPHPSQAFGPQPPQQPLPLQHPHLFPPQAPGLLPPQSPYPYAPQPGVLGQPPPPLHTQLYPGPAQDPLPAHSGALPFPSPGPPQPPHPPLAYGPAPSTRPMGPQAAPLTIRGPSSAGQSTPSPHLVPSPAPSPGPGPVPPRPPAAEPPPCLRRGAAAADLLSSSPESQHGGTQSPGGGQPLLQPTKVDAAEGRRPQALRLIERDPYEHPERLRQLQQELEAFRGQLGDVGALDTVWRELQDAQEHDARGRSIAIARCYSLKNRHQDVMPYDSNRVVLRSGKDDYINASCVEGLSPYCPPLVATQAPLPGTAADFWLMVHEQKVSVIVMLVSEAEMEKQKVARYFPTERGQPMVHGALSLALSSVRSTETHVERVLSLQFRDQSLKRSLVHLHFPTWPELGLPDSPSNLLRFIQEVHAHYLHQRPLHTPIIVHCSSGVGRTGAFALLYAAVQEVEAGNGIPELPQLVRRMRQQRKHMLQEKLHLRFCYEAVVRHVEQVLQRHGVPPPCKPLASASISQKNHLPQDSQDLVLGGDVPISSIQATIAKLSIRPPGGLESPVASLPGPAEPPGLPPASLPESTPIPSSSPPPLSSPLPEAPQPKEEPPVPEAPSSGPPSSSLELLASLTPEAFSLDSSLRGKQRMSKHNFLQAHNGQGLRATRPSDDPLSLLDPLWTLNKT

SEQ ID NO: 288 - protein, 283 aa, Homo sapiens
MCNTPTYCDLGKAAKDVFNKGYGFGMVKIDLKTKSCSGVEFSTSGHAYTDTGKASGNLETKYKVCNYGLTFTQKWNTDNTLGTEISWENKLAEGLKLTLDTIFVPNTGKKSGKLKASYKRDCFSVGSNVDIDFSGPTIYGWAVLAFEGWLAGYQMSFDTAKSKLSQNNFALGYKAADFQLHTHVNDGTEFGGSIYQKVNEKIETSINLAWTAGSNNTRFGIAAKYMLDCRTSLSAKVNNASLIGLGYTQTLRPGVKLTLSALIDGKNFSAGGHKVGLGFELEA

SEQ ID NO: 289 - protein, 1047 aa, Homo sapiens
MMAAEAGSEEGGPVTAGAGGGGAAAGSSAYPAVCRVKIPAALPVAAAPYPGLVETGVAGTLGGGAALGSEFLGAGSVAGALGGAGLTGGGTAAGVAGAAAGVAGAAVAGPSGDMALTKLPTSLLAETLGPGGGFPPLPPPPYLPPLGAGLGTVDEGDSLDGPEYEEEEVAIPLTAPPTNQWYHGKLDRTIAEERLRQAGKSGSYLIRESDRRPGSFVLSFLSQMNVVNHFRIIAMCGDYYIGGRRFSSLSDLIGYYSHVSCLLKGEKLLYPVAPPEPVEDRRRVRAILPYTKVPDTDEISFLKGDMFIVHNELEDGWMWVTNLRTDEQGLIVEDLVEEVGREEDPHEGKIWFHGKISKQEAYNLLMTVGQVCSFLVRPSDNTPGDYSLYFRTNENIQRFKICPTPNNQFMMGGRYYNSIGDIIDHYRKEQIVEGYYLKEPVPMQDQEQVLNDTVDGKEIYNTIRRKTKDAFYKNIVKKGYLLKKGKGKRWKNLYFILEGSDAQLIYFESEKRATKPKGLIDLSVCSVYVVHDSLFGRPNCFQIVVQHFSEEHYIFYFAGETPEQAEDWMKGLQAFCNLRKSSPGTSNKRLRQVSSLVLHIEEAHKLPVKHFTNPYCNIYLNSVQVAKTHAREGQNPVWSEEFVFDDLPPDINRFEITLSNKTKKSKDPDILFMRCQLSRLQKGHATDEWFLLSSHIPLKGIEPGSLRVRARYSMEKIMPEEEYSEFKELILQKELHVVYALSHVCGQDRTLLASILLRIFLHEKLESLLLCTLNDREISMEDEATTLFRATTLASTLMEQYMKATATQFVHHALKDSILKIMESKQSCELSPSKLEKNEDVNTNLTHLLNILSELVEKIFMASEILPPTLRYIYGCLQKSVQHKWPTNTTMRTRVVSGFVFLRLICPAILNPRMFNIISDSPSPIAARTLILVAKSVQNLANLVEFGAKEPYMEGVNPFIKSNKHRMIMFLDELGNVPELPDTTEHSRTDLSRDLAALHEICVAHSDELRTLSNERGAQQHVLKKLLAITELLQQKQNQYTKTNDVR

SEQ ID NO: 290 - protein, 540 aa, Homo sapiens
MPLFATNPFDQDVEKATSEMNTAEDWGLILDICDKVGQSRTGPKDCLRSIMRRVNHKDPHVAMQALTLLGACVSNCGKIFHLEVCSRDFASEVSNVLNKGHPKVCEKLKALMVEWTDEFKNDPQLSLISAMIKNLKEQGVTFPAIGSQAAEQAKASPALVAKDPGTVANKKEEEDLAKAIELSLKEQRQQSTTLSTLYPSTSSLLTNHQHEGRKVRAIYDFEAAEDNELTFKAGEIITVLDDSDPNWWKGETHQGIGLFPSNFVTADLTAEPEMIKTEKKTVQFSDDVQVETIEPEPEPAFIDEDKMDQLLQMLQSTDPSDDQPDLPELLHLEAMCHQMGPLIDEKLEDIDRKHSELSELNVKVMEALSLYTKLMNEDPMYSMYAKLQNQPYYMQSSGVSGSQVYAGPPPSGAYLVAGNAQMSHLQSYSLPPEQLSSLSQAVVPPSANPALPSQQTQAAYPNTMVSSVQGNTYPSQAPVYSPPPAATAAAATADVTLYQNAGPNMPQVPNYNLTSSTLPQPGGSQQPPQPQQPYSQKALL

SEQ ID NO: 291 - protein, 1255 aa, Homo sapiens [sequence omitted]

SEQ ID NO: 292 - protein, 195 aa, Homo sapiens
MGRARDAILDALENLTAEELKKFKLKLLSVPLREGYGRIPRGALLSMDALDLTDKLVSFYLETYGAELTANVLRDMGLQEMAGQLQAATHQGSGAAPAGIQAPPQSAAKPGLHFIDQHRAALIARVTNVEWLLDALYGKVLTDEQYQAVRAEPTNPSKMRKLFSFTPAWNWTCKDLLLQALRESQSYLVEDLERS

SEQ ID NO: 293 - protein, 738 aa, Homo sapiens
MRGPSGALWLLLALRTVLGGMEVRWCATSDPEQHKCGNMSEAFREAGIQPSLLCVRGTSADHCVQLIAAQEADAITLDGGAIYEAGKEHGLKPVVGEVYDQEVGTSYYAVAVVRRSSHVTIDTLKGVKSCHTGINRTVGWNVPVGYLVESGRLSVMGCDVLKAVSDYFGGSCVPGAGETSYSESLCRLCRGDSSGEGVCDKSPLERYYDYSGAFRCLAEGAGDVAFVKHSTVLENTDGKTLPSWGQALLSQDFELLCRDGSRADVTEWRQCHLARVPAHAVVVRADTDGGLIFRLLNEGQRLFSHEGSSFQMFSSEAYGQKDLLFKDSTSELVPIATQTYEAWLGHEYLHAMKGLLCDPNRLPPYLRWCVLSTPEIQKCGDMAVAFRRQRLKPEIQCVSAKSPQHCMERIQAEQVDAVTLSGEDIYTAGKTYGLVPAAGEHYAPEDSSNSYYVVAVVRRDSSHAFTLDELRGKRSCHAGFGSPAGWDVPVGALIQRGFIRPKDCDVLTAVSEFFNASCVPVNNPKNYPSSLCALCVGDEQGRNKCVGNSQERYYGYRGAFRCLVENAGDVAFVRHTTVFDNTNGHNSEPWAAELRSEDYELLCPNGARAEVSQFAACNLAQIPPHAVMVRPDTNIFTVYGLLDKAQDLFGDDHNKNGFKMFDSSNYHGQDLLFKDATVRAVPVGEKTTYRGWLGLDYVAALEGMSSQQCSGAAAPAPGAPLLPLLLPALAARLLPPAL

SEQ ID NO: 294 - protein, 866 aa, Homo sapiens
MFSMRIVCLVLSVVGTAWTADSGEGDFLAEGGGVRGPRVVERHQSACKDSDWPFCSDEDWNYKCPSGCRMKGLIDEVNQDFTNRINKLKNSLFEYQKNNKDSHSLTTNIMEILRGDFSSANNRDNTYNRVSEDLRSRIEVLKRKVIEKVQHIQLLQKNVRAQLVDMKRLEVDIDIKIRSCRGSCSRALAREVDLKDYEDQQKQLEQVIAKDLLPSRDRQHLPLIKMKPVPDLVPGNFKSQLQKVPPEWKALTDMPQMRMELERPGGNEITRGGSTSYGTGSETESPRNPSSAGSWNSGSSGPGSTGNRNPGSSGTGGTATWKPGSSGPGSTGSWNSGSSGTGSTGNQNPGSPRPGSTGTWNPGSSERGSAGHWTSESSVSGSTGQWHSESGSFRPDSPGSGNARPNNPDWGTFEEVSGNVSPGTRREYHTEKLVTSKGDKELRTGKEKVTSGSTTTTRRSCSKTVTKTVIGPDGHKEVTKEVVTSEDGSDCPEAMDLGTLSGIGTLDGFRHRHPDEAAFFDTASTGKTFPGFFSPMLGEFVSETESRGSESGIFTNTKESSSHHPGIAEFPSRGKSSSYSKQFTSSTSYNRGDSTFESKSYKMADEAGSEADHEGTHSTKRGHAKSRPVRDCDDVLQTHPSGTQSGIFNIKLPGSSKIFSVYCDQETSLGGWLLIQQRMDGSLNFNRTWQDYKRGFGSLNDEGEGEFWLGNDYLHLLTQRGSVLRVELEDWAGNEAYAEYHFRVGSEAEGYALQVSSYEGTAGDALIEGSVEEGAEYTSHNNMQFSTFDRDADQWEENCAEVYGGGWWYNNCQAANLNGIYYPGGSYDPRNNSPYEIENGVVWVSFRGADYSLRAVRMKIRPLVTQ

SEQ ID NO: 295 - protein, 1101 aa, Homo sapiens
MKSRQKGKKKGSAKERVFGCDLQEHLQHSGQEVPQVLKSCAEFVEEYGVVDGIYRLSGVSSNIQKLRQEFESERKPDLRRDVYLQDIHCVSSLCKAYFRELPDPLLTYRLYDKFAEAVGVQLEPERLVKILEVLRELPVPNYRTLEFLMRHLVHMASFSAQTNMHARNLAIVWAPNLLRSKDIEASGFNGTAAFMEVRVQSIVVEFILTHVDQLFGGAALSGGEVESGWRSLPGTRASGSPEDLMPRPLPYHLPSILQAGDGPPQMRPYHTIIEIAEHKRKGSLKVRKWRSIFNLGRSGHETKRKLPRGAEDREDKSNKGTLRPAKSMDSLSAAAGASDEPEGLVGPSSPRPSPLLPESLENDSIEAAEGEQEPEAEALGGTNSEPGTPRAGRSAIRAGGSSRAERCAGVHISDPYNVNLPLHITSILSVPPNIISNVSLARLTRGLECPALQHRPSPASGPGPGPGLGPGPPDEKLEASPASSPLADSGPDDLAPALEDSLSQEVQDSFSFLEDSSSSEPEWVGAEDGEVAQAEAAGAAFSPGEDDPGMGYLEELLGVGPQVEEFSVEPPLDDLSLDEAQFVLAPSCCSLDSAGPRPEVEEENGEEVFLSAYDDLSPLLGPKPPIWKGSGSLEGEAAGCGRQALGQGGEEQACWEVGEDKQAEPGGRLDIREEAEGSPETKVEAGKASEDRGEAGGSQETKVRLREGSREETEAKEEKSKGQKKADSMEAKGVEEPGGDEYTDEKEKEIEREEDEQREEAQVEAGRDLEQGAQEDQVAEEKWEVVQKQEAEGVREDEDKGQREKGYHEARKDQGDGEDSRSPEAATEGGAGEVSKERESGDGEAEGDQRAGGYYLEEDTLSEGSGVASLEVDCAKEGNPHSSEMEEVAPQPPQPEEMEPEGQPSPDGCLCPCSLGLGGVGMRLASTLVQVQQVRSVPVVPPKPQFAKMPSAMCSKIHVAPANPCPRPGRLDGTPGERAWGSRASRSSWRNGGSLSFDAAVALARDRQRTEAQGVRRTQTCTEGGDYCLIPRTSPCSMISAHSPRPLSCLELPSEGAEGSGSRSRLSLPPREPQVPDPLLSSQRRSYAFETQANPGKGEGL

SEQ ID NO: 296 - protein, 1009 aa, Homo sapiens
MSGVSEPLSRVKLGTLRRPEGPAEPMVVVPVDVEKEDVRILKVCFYSNSFNPGKNFKLVKCTVQTEIREIITSILLSGRIGPNIRLAECYGLRLKHMKSDEIHWLHPQMTVGEVQDKYECLHVEAEWRYDLQIRYLPEDFMESLKEDRTTLLYFYQQLRNDYMQRYASKVSEGMALQLGCLELRRFFKDMPHNALDKKSNFELLEKEVGLDLFFPKQMQENLKPKQFRKMIQQTFQQYASLREEECVMKFFNTLAGFANIDQETYRCELIQGWNITVDLVIGPKGIRQLTSQDAKPTCLAEFKQIRSIRCLPLEEGQAVLQLGIEGAPQALSIKTSSLAEAENMADLIDGYCRLQGEHQGSLIIHPRKDGEKRNSLPQIPMLNLEARRSHLSESCSIESDIYAEIPDETLRRPGGPQYGIAREDVVLNRILGEGFFGEVYEGVYTNHKGEKINVAVKTCKKDCTLDNKEKFMSEAVIMKNLDHPHIVKLIGIIEEEPTWIIMELYPYGELGHYLERNKNSLKVLTLVLYSLQICKAMAYLESINCVHRDIAVRNILVASPECVKLGDFGLSRYIEDEDYYKASVTRLPIKWMSPESINFRRFTTASDVWMFAVCMWEILSFGKQPFFWLENKDVIGVLEKGDRLPKPDLCPPVLYTLMTRCWDYDPSDRPRFTELVCSLSDVYQMEKDIAMEQERNARYRTPKILEPTAFQEPPPKPSRPKYRPPPQTNLLAPKLQFQVPEGLCASSPTLTSPMEYPSPVNSLHTPPLHRHNVFKRHSMREEDFIQPSSREEAQQLWEAEKVKMRQILDKQQKQMVEDYQWLRQEEKSLDPMVYMNDKSPLTPEKEVGYLEFTGPPQKPPRLGAQSIQPTANLDRTDDLVYLNVMELVRAVLELKNELCQLPPEGYVVVVKNVGLTLRKLIGSVDDLLPSLPSSSRTEIEGTQKLLNKDLAELINKMRLAQQNAVTSLSEECKRQMLTASHTLAVDAKNLLDAVDQAKVLANLAHPPAE

SEQ ID NO: 297 - protein, 662 aa, Homo sapiens
MVVSEVDIAKADPAAASHPLLLNGDATVAQKNPGSVAENNLCSQYEEKVRPCIDLIDSLRALGVEQDLALPAIAVIGDQSSGKSSVLEALSGVALPRGSGIVTRCPLVLKLKKLVNEDKWRGKVSYQDYEIEISDASEVEKEINKAQNAIAGEGMGISHELITLEISSRDVPDLTLIDLPGITRVAVGNQPADIGYKIKTLIKKYIQRQETISLVVVPSNVDIATTEALSMAQEVDPEGDRTIGILTKPDLVDKGTEDKVVDVVRNLVFHLKKGYMIVKCRGQQEIQDQLSLSEALQREKIFFENHPYFRDLLEEGKATVPCLAEKLTSELITHICKSLPLLENQIKETHQRITEELQKYGVDIPEDENEKMFFLIDKVNAFNQDITALMQGEETVGEEDIRLFTRLRHEFHKWSTIIENNFQEGHKILSRKIQKFENQYRGRELPGFVNYRTFETIVKQQIKALEEPAVDMLHTVTDMVRLAFTDVSIKNFEEFFNLHRTAKSKIEDIRAEQEREGEKLIRLHFQMEQIVYCQDQVYRGALQKVREKELEEEKKKKSWDFGAFQSSSATDSSMEEIFQHLMAYHQEASKRISSHIPLIIQFFMLQTYGQQLQKAMLQLLQDKDTYSWLLKERSDTSDKRKFLKERLARLTQARRRLAQFPG

SEQ ID NO: 298 - protein, 343 aa, Homo sapiens
MESKYKEILLLTGLDNITDEELDRFKFFLSDEFNIATGKLHTANRIQVATLMIQNAGAVSAVMKTIRIFQKLNYMLLAKRLQEEKEKVDKQYKSVTKPKPLSQAEMSPAASAAIRNDVAKQRAAPKVSPHVKPEQKQMVAQQESIREGFQKRCLPVMVLKAKKPFTFETQEGKQEMFHATVATEKEFFFVKVFNTLLKDKFIPKRIIIIARYYRHSGFLEVNSASRVLDAESDQKVNVPLNIIRKAGETPKINTLQTQPLGTIVNGLFVVQKVTEKKKNILFDLSDNTGKMEVLGVRNEDTMKCKEGDKVRLTFFTLSKNGEKLQLTSGVHSTIKVIKAKKKT

SEQ ID NO: 299 - protein, 1158 aa, Homo sapiens
MAAVRGAPLLSCLLALLALCPGGRPQTVLTDDEIEEFLEGFLSELEPEPREDDVEAPPPPEPTPRVRKAQAGGKPGKRPGTAAEVPPEKTKDKGKKGKKDKGPKVPKESLEGSPRPPKKGKEKPPKATKKPKEKPPKATKKPKEKPPKATKKPKEKPPKATKKPPSGKRPPILAPSETLEWPLPPPPSPGPEELPQEGGAPLSNNWQNPGEETHVEAREHQPEPEEETEQPTLDYNDQIEREDYEDFEYIRRQKQPRPPPSRRRRPERVWPEPPEEKAPAPAPEERIEPPVKPLLPPLPPDYGDGYVIPNYDDMDYYFGPPPPQKPDAERQTDEEKEELKKPKKEDSSPKEETDKWAVEKGKDHKEPRKGEELEEEWTPTEKVKCPPIGMESHRIEDNQIRASSMLRHGLGAQRGRLNMQTGATEDDYYDGAWCAEDDARTQWIEVDTRRTTRFTGVITQGRDSSIHDDFVTTFFVGFSNDSQTWVMYTNGYEEMTFHGNVDKDTPVLSELPEPVVARFIRIYPLTWNGSLCMRLEVLGCSVAPVYSYYAQNEVVATDDLDFRHHSYKDMRQLMKVVNEECPTITRTYSLGKSSRGLKIYAMEISDNPGEHELGEPEFRYTAGIHGNEVLGRELLLLLMQYLCREYRDGNPRVRSLVQDTRIHLVPSLNPDGYEVAAQMGSEFGNWALGLWTEEGFDIFEDFPDLNSVLWGAEERKWVPYRVPNNNLPIPERYLSPDATVSTEVRAIIAWMEKNPFVLGANLNGGERLVSYPYDMARTPTQEQLLAAAMAAARGEDEDEVSEAQETPDHAIFRWLAISFASAHLTLTEPYRGGCQAQDYTGGMGIVNGAKWNPRTGTINDFSYLHTNCLELSFYLGCDKFPHESELPREWENNKEALLTFMEQVHRGIKGVVTDEQGIPIANATISVSGINHGVKTASGGDYWRILNPGEYRVTAHAEGYTPSAKTCNVDYDIGATQCNFILARSNWKRIREIMAMNGNRPIPHIDPSRPMTPQQRRLQQRRLQHRLRLRAQMRLRRLNATTTLGPHTVPPTLPPAPATTLSTTIEPWGLIPPTTAGWEESETETYTEVVTEFGTEVEPEFGTKVEPEFETQLEPEFETQLEPEFEEEEEEEKEEEIATGQAFPFTTVETYTVNFGDF

SEQ ID NO: 300 - protein, 1132 aa, Homo sapiens
MEPNDSTSTAVEEPDSLEVLVKTLDSQTRTFIVGAQMNVKEFKEHIAASVSIPSEKQRLIYQGRVLQDDKKLQEYNVGGKVIHLVERAPPQTHLPSGASSGTGSASATHGGGSPPGTRGPGASVHDRNANSYVMVGTFNLPSDGSAVDVHINMEQAPIQSEPRVRLVMAQHMIRDIQTLLSRMETLPYLQCRGGPQPQHSQPPPQPPAVTPEPVALSSQTSEPVESEAPPREPMEAEEVEERAPAQNPELTPGPAPAGPTPAPETNAPNHPSPAEYVEVLQELQRLESRLQPFLQRYYEVLGAAATTDYNNNHEGREEDQRLINLVGESLRLLGNTFVALSDLRCNLACTPPRHLHVVRPMSHYTTPMVLQQAAIPIQINVGTTVTMTGNGTRPPPTPNAEAPPPGPGQASSVAPSSTNVESSAEGAPPPGPAPPPATSHPRVIRISHQSVEPVVMMHMNIQDSGTQPGGVPSAPTGPLGPPGHGQTLGQQVPGFPTAPTRVVIARPTPPQARPSHPGGPPVSGTLQGAGLGTNASLAQMVSGLVGQLLMQPVLVAQGTPGMAPPPAPATASASAGTTNTATTAGPAPGGPAQPPPTPQPSMADLQFSQLLGNLLGPAGPGAGGSGVASPTITVAMPGVPAFLQGMTDFLQATQTAPPPPPPPPPPPPAPEQQTMPPPGSPSGGAGSPGGLGLESLSPEFFTSVVQGVLSSLLGSLGARAGSSESIAAFIQRLSGSSNIFEPGADGALGFFGALLSLLCQNFSMVDVVMLLHGHFQPLQRLQPQLRSFFHQHYLGGQEPTPSNIRMATHTLITGLEEYVRESFSLVQVQPGVDIIRTNLEFLQEQFNSIAAHVLHCTDSGFGARLLELCNQGLFECLALNLHCLGGQQMELAAVINGRIRRMSRGVNPSLVSWLTTMMGLRLQVVLEHMPVGPDAILRYVRRVGDPPQPLPEEPMEVQGAERASPEPQRENASPAPGTTAEEAMSRGPPPAPEGGSRDEQDGASAETEPWAAAVPPEWVPIIQQDIQSQRKVKPQPPLSDAYLSGMPAKRRKTMQGEGPQLLLSEAVSRAAKAAGARPLTSPESLSRDLEAPEVQESYRQQLRSDIQKRLQEDPNYSPQRFPNAQRAFADDP

SEQ ID NO: 301 - protein, 1203 aa, Homo sapiens
MGNLKSVAQEPGPPCGLGLGLGLGLCGKQGPATPAPEPSRAPASLLPPAPEHSPPSSPLTQPPEGPKFPRVKNWEVGSITYDTLSAQAQQDGPCTPRRCLGSLVFPRKLQGRPSPGPPAPEQLLSQARDFINQYYSSIKRSGSQAHEQRLQEVEAEVAATGTYQLRESELVFGAKQAWRNAPRCVGRIQWGKLQVFDARDCRSAQEMFTYICNHIKYATNRGNLRSAITVFPQRCPGRGDFRIWNSQLVRYAGYRQQDGSVRGDPANVEITELCIQHGWTPGNGRFDVLPLLLQAPDDPPELFLLPPELVLEVPLEHPTLEWFAALGLRWYALPAVSNMLLEIGGLEFPAAPFSGWYMSTEIGTRNLCDPHRYNILEDVAVCMDLDTRTTSSLWKDKAAVEINVAVLHSYQLAKVTIVDHHAATASFMKHLENEQKARGGCPADWAWIVPPISGSLTPVFHQEMVNYFLSPAFRYQPDPWKGSAAKGTGITRKKTFKEVANAVKISASLMGTVMAKRVKATILYGSETGRAQSYAQQLGRLFRKAFDPRVLCMDEYDVVSLEHETLVLVVTSTFGNGDPPENGESFAAALMEMSGPYNSSPRPEQHKSYKIRFNSISCSDPLVSSWRRKRKESSNTDSAGALGTLRFCVFGLGSRAYPHFCAFARAVDTRLEELGGERLLQLGQGDELCGQEEAFRGWAQAAFQAACETFCVGEDAKAAARDIFSPKRSWKRQRYRLSAQAEGLQLLPGLIHVHRRKMFQATIRSVENLQSSKSTRATILVRLDTGGQEGLQYQPGDHIGVCPPNRPGLVEALLSRVEDPPAPTEPVAVEQLEKGSPGGPPPGWVRDPRLPPCTLRQALTFFLDITSPPSPQLLRLLSTLAEEPREQQELEALSQDPRRYEEWKWFRCPTLLEVLEQFPSVALPAPLLLTQLPLLQPRYYSVSSAPSTHPGEIHLTVAVLAYRTQDGLGPLHYGVCSTWLSQLKPGDPVPCFIRGAPSFRLPPDPSLPCILVGPGTGIAPFRGFWQERLHDIESKGLQPTPMTLVFGCRCSQLDHLYRDEVQNAQQRGVFGRVLTAFSREPDNPKTYVQDILRTELAAEVHRVLCLERGHMFVCGDVTMATNVLQTVQRILATEGDMELDEAGDVIGVLRDQQRYHEDIFGLTLRTQEVTSRIRTQSFSLQERQLRGAVPWAFDPPGSDTNSP

SEQ ID NO: 302 - protein, 431 aa, Homo sapiens
MHVRSLRAAAPHSFVALWAPLFLLRSALADFSLDNEVHSSFIHRRLRSQERREMQREILSILGLPHRPRPHLQGKHNSAPMFMLDLYNAMAVEEGGGPGGQGFSYPYKAVFSTQGPPLASLQDSHFLTDADMVMSFVNLVEHDKEFFHPRYHHREFRFDLSKIPEGEAVTAAEFRIYKDYIRERFDNETFRISVYQVLQEHLGRESDLFLLDSRTLWASEEGWLVFDITATSNHWVVNPRHNLGLQLSVETLDGQSINPKLAGLIGRHGPQNKQPFMVAFFKATEVHFRSIRSTGSKQRSQNRSKTPKNQEALRMANVAENSSSDQRQACKKHELYVSFRDLGWQDWIIAPEGYAAYYCEGECAFPLNSYMNATNHAIVQTLVHFINPETVPKPCCAPTQLNAISVLYFDDSSNVILKKYRNMVVRACGCH

SEQ ID NO: 303 - protein, 955 aa, Homo sapiens
MPSLPAPPAPLLLLGLLLLGSRPARGAGPEPPVLPIRSEKEPLPVRGAAGCTFGGKVYALDETWHPDLGEPFGVMRCVLCACEAPQWGRRTRGPGRVSCKNIKPECPTPACGQPRQLPGHCCQTCPQERSSSERQPSGLSFEYPRDPEHRSYSDRGEPGAEERARGDGHTDFVALLTGPRSQAVARARVSLLRSSLRFSISYRRLDRPTRIRFSDSNGSVLFEHPAAPTQDGLVCGVWRAVPRLSLRLLRAEQLHVALVTLTHPSGEVWGPLIRHRALAAETFSAILTLEGPPQQGVGGITLLTLSDTEDSLHFLLLFRGLLEPRSGGLTQVPLRLQILHQGQLLRELQANVSAQEPGFAEVLPNLTVQEMDWLVLGELQMALEWAGRPGLRISGHIAARKSCDVLQSVLCGADALIPVQTGAAGSASLTLLGNGSLIYQVQVVGTSSEVVAMTLETKPQRRDQRTVLCHMAGLQPGGHTAVGICPGLGARGAHMLLQNELFLNVGTKDFPDGELRGHVAALPYCGHSARHDTLPVPLAGALVLPPVKSQAAGHAWLSLDTHCHLHYEVLLAGLGGSEQGTVTAHLLGPPGTPGPRRLLKGFYGSEAQGVVKDLEPELLRHLAKGMASLMITTKGSPRGELRGQVHIANQCEVGGLRLEAAGAEGVRALGAPDTASAAPPVVPGLPALAPAKPGGPGRPRDPNTCFFEGQQRPHGARWAPNYDPLCSLCTCQRRTVICDPVVCPPPSCPHPVQAPDQCCPVCPEKQDVRDLPGLPRSRDPGEGCYFDGDRSWRAAGTRWHPVVPPFGLIKCAVCTCKGGTGEVHCEKVQCPRLACAQPVRVNPTDCCKQCPVGSGAHPQLGDPMQADGPRGCRFAGQWFPESQSWHPSVPPFGEMSCITCRCGAGVPHCERDDCSLPLSCGSGKESRCCSRCTAHRRPAPETRTDPELEKEAEGS

SEQ ID NO: 304 - protein, 228 aa, Homo sapiens
MASEELQKDLEEVKVLLEKATRKRVRDALTAEKSKIETEIKNKMQQKSQKKAELLDNEKPAAVVAPITTGYTVKISNYGWDQSDKFVKIYITLTGVHQVPTENVQVHFTERSFDLLVKNLNGKSYSMIVNNLLKPISVEGSSKKVKTDTVLILCRKKVENTRWDYLTQVEKECKEKEKPSYDTETDPSEGLMNVLKKIYEDGDDDMKRTINKAWVESREKQAKGDTEF

SEQ ID NO: 305 - protein, 175 aa, Homo sapiens
MASRKAGTRGKVAATKQAQRGSSNVFSMFEQAQIQEFKEAFSCIDQNRDGIICKADLRETYSQLGKVSVPEEELDAMLQEGKGPINFTVFLTLFGEKLNGTDPEEAILSAFRMFDPSGKGVVNKDEFKQLLLTQADKFSPAEVEQMFALTPMDLAGNIDYKSLCYIITHGDEKEE

SEQ ID NO: 306 - protein, 526 aa, Homo sapiens
MQSESGIVPDFEVGEEFHEEPKTYYELKSQPLKSSSSAEHPGASKPPISSSSMTSRILLRQQLMREQMQEQERREQQQKLQAAQFMQQRVPVSQTPAINVSVPTTLPSATQVPMEVLKVQTHLENPTKYHIQQAQRQQVKQYLSTTLANKHANQVLSLPCPNQPGDHVMPPVPGSSAPNSPMAMLTLNSNCEKEGFYKFEEQNRAESECPGMNTHSRASCMQMDDVIDDIISLESSYNEEILGLMDPALQMANTLPVSGNLIDLYGNQGLPPPGLTISNSCPANLPNIKRELTACIFPTESEARALAKERQKKDNHNLIERRRRFNINDRIKELGTLIPKSNDPDMRWNKGTILKASVDYIRKLQREQQRAKELENRQKKLEHANRHLLLRIQELEMQARAHGLSLIPSTGLCSPDLVNRIIKQEPVLENCSQDLLQHHADLTCTTTLDLTDGTITFNNNLGTGTEANQAYSVPTKMGSKLEDILMDDTLSPVGVTDPLLSSVSPGASKTSSRRSSMSMEETEHTC

SEQ ID NO: 307 - protein, 165 aa, Homo sapiens
MAPNASCLCVHVRSEEWDLMTFDANPYDSVKKIKEHVRSKTKVPVQDQVLLLGSKILKPRRSLSSYGIDKEKTIHLTLKVVKPSDEELPLFLVESGDEAKRHLLQVRRSSSVAQVKAMIETKTGIIPETQIVTCNGKRLEDGKMMADYGIRKGNLLFLACYCIGG

SEQ ID NO: 308 - protein, 316 aa, Homo sapiens
MGNRHAKASSPQGFDVDRDAKKLNKACKGMGTNEAAIIEILSGRTSDERQQIKQKYKATYGKELEEVLKSELSGNFEKTALALLDRPSEYAARQLQKAMKGLGTDESVLIEVLCTRTNKEIIAIKEAYQRLFDRSLESDVKGDTSGNLKKILVSLLQANRNEGDDVDKDLAGQDAKDLYDAGEGRWGTDELAFNEVLAKRSYKQLRATFQAYQILIGKDIEEAIEEETSGDLQKAYLTLVRCAQDCEDYFAERLYKSMKGAGTDEETLIRIVVTRAEVDLQGIKAKFQEKYQKSLSDMVRSDTSGDFRKLLVALLH

SEQ ID NO: 309 - protein, 732 aa, Homo sapiens
MPEETQTQDQPMEEEEVETFAFQAEIAQLMSLIINTFYSNKEIFLRELISNSSDALDKIRYESLTDPSKLDSGKELHINLIPNKQDRTLTIVDTGIGMTKADLINNLGTIAKSGTKAFMEALQAGADISMIGQFGVGFYSAYLVAEKVTVITKHNDDEQYAWESSAGGSFTVRTDTGEPMGRGTKVILHLKEDQTEYLEERRIKEIVKKHSQFIGYPITLFVEKERDKEVSDDEAEEKEDKEEEKEKEEKESEDKPEIEDVGSDEEEEKKDGDKKKKKKIKEKYIDQEELNKTKPIWTRNPDDITNEEYGEFYKSLTNDWEDHLAVKHFSVEGQLEFRALLFVPRRAPFDLFENRKKKNNIKLYVRRVFIMDNCEELIPEYLNFIRGVVDSEDLPLNISREMLQQSKILKVIRKNLVKKCLELFTELAEDKENYKKFYEQFSKNIKLGIHEDSQNRKKLSELLRYYTSASGDEMVSLKDYCTRMKENQKHIYYITGETKDQVANSAFVERLRKHGLEVIYMIEPIDEYCVQQLKEFEGKTLVSVTKEGLELPEDEEEKKKQEEKKTKFENLCKIMKDILEKKVEKVVVSNRLVTSPCCIVTSTYGWTANMERIMKAQALRDNSTMGYMAAKKHLEINPDHSIIETLRQKAEADKNDKSVKDLVILLYETALLSSGFSLEDPQTHANRIYRMIKLGLGIDEDDPTADDTSAAVTEEMPPLEGDDDTSRMEEVD

SEQ ID NO: 310 - protein, 323 aa, Homo sapiens
MAYVPAPGYQPTYNPTLPYYQPIPGGLNVGMSVYIQGVASEHMKRFFVNFVVGQDPGSDVAFHFNPRFDGWDKVVFNTLQGGKWGSEERKRSMPFKKGAAFELVFIVLAEHYKVVVNGNPFYEYGHRLPLQMVTHLQVDGDLQLQSINFIGGQPLRPQGPPMMPPYPGPGHCHQQLNSLPTMEGPPTFNPPVPYFGRLQGGLTARRTIIIKGYVPPTGKSFAINFKVGSSGDIALHINPRMGNGTVVRNSLLNGSWGSEEKKITHNPFGPGQFFDLSIRCGLDRFKVYANGQHLFDFAHRLSAFQRVDTLEIQGDVTLSYVQI

SEQ ID NO: 311 - protein, 1643 aa, Homo sapiens
MHRAVDPPGARAAREAFALGGLSCAGAWSSCPPHPPPRSAWLPGGRCSASIGQPPLPAPLPPSHGSSSGHPSKPYYAPGAPTPRPLHGKLESLHGCVQALLREPAQPGLWEQLGQLYESEHDSEEATRCYHSALRYGGSFAELGPRIGRLQQAQLWNFHTGSCQHRAKVLPPLEQVWNLLHLEHKRNYGAKRGGPPVKRAAEPPVVQPVPPAALSGPSGEEGLSPGGKRRRGCNSEQTGLPPGLPLPPPPLPPPPPPPPPPPPPLPGLATSPPFQLTKPGLWSTLHGDAWGPERKGSAPPERQEQRHSLPHPYPYPAPAYTAHPPGHRLVPAAPPGPGPRPPGAESHGCLPATRPPGSDLRESRVQRSRMDSSVSPAATTACVPYAPSRPPGLPGTTTSSSSSSSSNTGLRGVEPNPGIPGADHYQTPALEVSHHGRLGPSAHSSRKPFLGAPAATPHLSLPPGPSSPPPPPCPRLLRPPPPPAWLKGPACRAAREDGEILEELFFGTEGPPRPAPPPLPHREGFLGPPASRFSVGTQDSHTPPTPPTPTTSSSNSNSGSHSSSPAGPVSFPPPPYLARSIDPLPRPPSPAQNPQDPPLVPLTLALPPAPPSSCHQNTSGSFRRPESPRPRVSFPKTPEVGPGPPPGPLSKAPQPVPPGVGELPARGPRLFDFPPTPLEDQFEEPAEFKILPDGLANIMKMLDESIRKEEEQQQHEAGVAPQPPLKEPFASLQSPFPTDTAPTTTAPAVAVTTTTTTTTTTTATQEEEKKPPPALPPPPPLAKFPPPSQPQPPPPPPPSPASLLKSLASVLEGQKYCYRGTGAAVSTRPGPLPTTQYSPGPPSGATALPPTSAAPSAQGSPQPSASSSSQFSTSGGPWARERRAGEEPVPGPMTPTQPPPPLSLPPARSESEVLEEISRACETLVERVGRSATDPADPVDTAEPADSGTERLLPPAQAKEEAGGVAAVSGSCKRRQKEHQKEHRRHRRACKDSVGRRPREGRAKAKAKVPKEKSRRVLGNLDLQSEEIQGREKSRPDLGGASKAKPPTAPAPPSAPAPSAQPTPPSASVPGKKAREEAPGPPGVSRADMLKLRSLSEGPPKELKIRLIKVESGDKETFIASEVEERRLRMADLTISHCAADVVRASRNAKVKGKFRESYLSPAQSVKPKINTEEKLPREKLNPPTPSIYLESKRDAFSPVLLQFCTDPRNPITVIRGLAGSLRLNLGLFSTKTLVEASGEHTVEVRTQVQQPSDENWDLTGTRQIWPCESSRSHTTIAKYAQYQASSFQESLQEEKESEDEESEEPDSTTGTPPSSAPDPKNHHIIKFGTNIDLSDAKRWKPQLQELLKLPAFMRVTSTGNMLSHVGHTILGMNTVQLYMKVPGSRTPGHQENNNFCSVNINIGPGDCEWFAVHEHYWETISAFCDRHGVDYLTGSWWPILDDLYASNIPVYRFVQRPGDLVWINAGTVHWVQATGWCNNIAWNVGPLTAYQYQLALERYEWNEVKNVKSIVPMIHVSWNVARTVKISDPDLFKMIKFCLLQSMKHCQVQRESLVRAGKKIAYQGRVKDEPAYYCNECDVEVFNILFVTSENGSRNTYLVHCEGCARRRSAGLQGVVVLEQYRTEELAQAYDAFTLAPASTSR

SEQ ID NO: 312 - protein, 353 aa, Homo sapiens
MEKTLETVPLERKKREKEQFRKLFIGGLSFETTEESLRNYYEQWGKLTDCVVMRDPASKRSRGFGFVTFSSMAEVDAAMAARPHSIDGRVVEPKRAVAREESGKPGAHVTVKKLFVGGIKEDTEEHHLRDYFEEYGKIDTIEIITDRQSGKKRGFGFVTFDDHDPVDKIVLQKYHTINGHNAEVRKALSRQEMQEVQSSRSGRGGNFGFGDSRGGGGNFGPGPGSNFRGGSDGYGSGRGFGDGYNGYGGGPGGGNFGGSPGYGGGRGGYGGGGPGYGNQGGGYGGGYDNYGGGNYGSGNYNDFGNYNQQPSNYGPMKSGNFGGSRNMGGPYGGGNYGPGGSGGSGGYGGRSRY

SEQ ID NO: 313 - protein, 294 aa, Homo sapiens
MEDSMDMDMSPLRPQNYLFGCELKADKDYHFKVDNDENEHQLSLRTVSLGAGAKDELHIVEAEAMNYEGSPIKVTLATLKMSVQPTVSLGGFEITPPVVLRLKCGSGPVHISGQHLVAVEEDAESEDEEEEDVKLLSISGKRSAPGGGSKVPQKKVKLAADEDDDDDDEEDDDEDDDDDDFDDEEAEEKAPVKKSIRDTPAKNAQKSNQNGKDSKPSSTPRSKGQESFKKQEKTPKTPKGPSSVEDIKAKMQASIEKGGSLPKVEAKFINYVKNCFRMTDQEAIQDLWQWRKSL

SEQ ID NO: 314 - protein, 460 aa, Homo sapiens
MNKPITPSTYVRCLNVGLIRKLSDFIDPQEGWKKLAVAIKKPSGDDRYNQFHIRRFEALLQTGKSPTSELLFDWGTTNCTVGDLVDLLIQNEFFAPASLLLPDAVPKTANTLPSKEAITVQQKQMPFCDKDRTLMTPVQNLEQSYMPPDSSSPENKSLEVSDTRFHSFSFYELKNVTNNFDERPISVGGNKMGEGGFGVVYKGYVNNTTVAVKKLAAMVDITTEELKQQFDQEIKVMAKCQHENLVELLGFSSDGDDLCLVYVYMPNGSLLDRLSCLDGTPPLSWHMRCKIAQGAANGINFLHENHHIHRDIKSANILLDEAFTAKISDFGLARASEKFAQTVMTSRIVGTTAYMAPEALRGEITPKSDIYSFGVVLLEIITGLPAVDEHREPQLLLDIKEEIEDEEKTIEDYIDKKMNDADSTSVEAMYSVASQCLHEKKNKRPDIKKVQQLLQEMTAS

SEQ ID NO: 315 - protein, 119 aa, Homo sapiens
MSRSVALAVLALLSLSGLEAIQRTPKIQVYSRHPAENGKSNFLNCYVSGFHPSDIEVDLLKNGERIEKVEHSDLSFSKDWSFYLLYYTEFTPTEKDEYACRVNHVTLSQPKIVKWDRDM

SEQ ID NO: 316 - protein, 217 aa, Homo sapiens [sequence omitted]

SEQ ID NO: 317 - protein, 225 aa, Homo sapiens
MDIRPNHTIYINNMNDKIKKEELKRSLYALFSQFGHVVDIVALKTMKMRGQAFVIFKELGSSTNALRQLQGFPFYGKPMRIQYAKTDSDIISKMRGTFADKEKKKEKKKAKTVEQTATTTNKKPGQGTPNSANTQGNSTPNPQVPDYPPNYILFLNNLPEETNEMMLSMLFNQFPGFKEVRLVPGRHDIAFVEFENDGQAGAARDALQGFKITPSHAMKITYAKK

SEQ ID NO: 318 - protein, 282 aa, Homo sapiens
MLPLLRCVPRVLGSSVAGLRAAAPASPFRQLLQPAPRLCTRPFGLLSVRAGSERRPGLLRPRGPCACGCGCGSLHTDGDKAFVDFLSDEIKEERKIQKHKTLPKMSGGWELELNGTEAKLVRKVAGEKITVTFNINNSIPPTFDGEEEPSQGQKVEEQEPELTSTPNFVVEVIKNDDGKKALVLDCHYPEDEVGQEDEAESDIFSIREVSFQSTGESEWKDTNYTLNTDSLDWALYDHLMDFLADRGVDNTFADELVELSTALEHQEYITFLEDLKSFVKSQ

SEQ ID NO: 319 - protein, 1863 aa, Homo sapiens; identical to SEQ ID NO: 144

SEQ ID NO: 320 - protein, 372 aa, Homo sapiens
MSKSESPKEPEQLRKLFIGGLSFETTDESLRSHFEQWGTLTDCVVMRDPNTKRSRGFGFVTYATVEEVDAAMNARPHKVDGRVVEPKRAVSREDSQRPGAHLTVKKIFVGGIKEDTEEHHLRDYFEQYGKIEVIEIMTDRGSGKKRGFAFVTFDDHDSVDKIVIQKYHTVNGHNCEVRKALSKQEMASASSSQRGRSGSGNFGGGRGGGFGGNDNFGRGGNFSGRGGFGGSRGGGGYGGSGDGYNGFGNDGGYGGGGPGYSGGSRGYGSGGQGYGNQGSGYGGSGSYDSYNNGGGGGFGGGSGSNFGGGGSYNDFGNYNNQSSNFGPMKGGNFGGRSSGPYGGGGQYFAKPRNQGGYGGSSSSSSYGSGRRF

SEQ ID NO: 321 - protein, 102 aa, Homo sapiens
MSARVRSRSRGRGDGQEAPDVVAFVAPGESQQEEPPTDNQDIEPGQEREGTPPIEERKVEGDCQEMDLEKTRSERGDGSDVKEKTPPNPKHAKTKEAGDGQP

SEQ ID NO: 322 - protein, 81 aa, Homo sapiens
MESPKKKNQQLKVGILHLGSRQKKIRIQLRSQCATWKVICKSCISQTPGINLDLGSGVKVKIIPKEEHCKMPEAGEEQPQV

SEQ ID NO: 323 - protein, 81 aa, Homo sapiens; identical to SEQ ID NO: 322

SEQ ID NO: 324 - protein, 490 aa, Homo sapiens
MSEVTKNSLEKILPQLKCHFTWNLFKEDSVSRDLEDRVCNQIEFLNTEFKATMYNLLAYIKHLDGNNEAALECLRQAEELIQQEHADQAEIRSLVTWGNYAWVYYHLGRLSDAQIYVDKVKQTCKKFSNPYSIEYSELDCEEGWTQLKCGRNERAKVCFEKALEEKPNNPEFSSGLAIAMYHLDNHPEKQFSTDVLKQAIELSPDNQYVKVLLGLKLQKMNKEAEGEQFVEEALEKSPCQTDVLRSAAKFYRRKGDLDKAIELFQRVLESTPNNGYLYHQIGCCYKAKVRQMQNTGESEASGNKEMIEALKQYAMDYSNKALEKGLNPLNAYSDLAEFLETECYQTPFNKEVPDAEKQQSHQRYCNLQKYNGKSEDTAVQHGLEGLSISKKSTDKEEIKDQPQNVSENLLPQNAPNYWYLQGLIHKQNGDLLQAAKCYEKELGRLLRDAPSGIGSIFLSASELEDGSEEMGQGAVSSSPRELLSNSEQLN

SEQ ID NO: 325 - protein, 222 aa, Homo sapiens
MSGLGRLFGKGKKEKGPTPEEAIQKLKETEKILIKKQEFLEQKIQQELQTAKKYGTKNKRAALQALRRKKRFEQQLAQTDGTLSTLEFQREAIENATTNAEVLRTMELAAQSMKKAYQDMDIDKVDELMTDITEQQEVAQQISDAISRPMGFGDDVDEDELLEELEELEQEELAQELLNVGDKEEEPSVKLPSVPSTHLPAGPAPKVDEDEEALKQLAEWVS

SEQ ID NO: 326 - protein, 1024 aa, Homo sapiens
MSNAKERKHAKKMRNQPTNVTLSSGFVADRGVKHHSGGEKPFQAQKQEPHPGTSRQRQTRVNPHSLPDPEVNEQSSSKGMFRKKGGWKAGPEGTSQEIPKYITASTFAQARAAEISAMLKAVTQKSSNSLVFQTLPRHMRRRAMSHNVKRLPRRLQEIAQKEAEKAVHQKKEHSKNKCHKARRCHMNRTLEFNRRQKKNIWLETHIWHAKRFHMVKKWGYCLGERPTVKSHRACYRAMTNRCLLQDLSYYCCLELKGKEEEILKALSGMCNIDTGLTFAAVHCLSGKRQGSLVLYRVNKYPREMLGPVTFIWKSQRTPGDPSESRQLWIWLHPTLKQDILEEIKAACQCVEPIKSAVCIADPLPTPSQEKSQTELPDEKIGKKRKRKDDGENAKPIKKIIGDGTRDPCLPYSWISPTTGIIISDLTMEMNRFRLIGPLSHSILTEAIKAASVHTVGEDTEETPHRWWIETCKKPDSVSLHCRQEAIFELLGGITSPAEIPAGTILGLTVGDPRINLPQKKSKALPNPEKCQDNEKVRQLLLEGVPVECTHSFIWNQDICKSVTENKISDQDLNRMRSELLVPGSQLILGPHESKIPILLIQQPGKVTGEDRLGWGSGWDVLLPKGWGMAFWIPFIYRGVRVGGLKESAVHSQYKRSPNVPGDFPDCPAGMLFAEEQAKNLLEKYKRRPPAKRPNYVKLGTLAPFCCPWEQLTQDWESRVQAYEEPSVASSPNGKESDLRRSEVPCAPMPKKTHQPSDEVGTSIEHPREAEEVMDAGCQESAGPERITDQEASENHVAATGSHLCVLRSRKLLKQLSAWCGPSSEDSRGGRRAPGRGQQGLTREACLSILGHFPRALVWVSLSLLSKGSPEPHTMICVPAKEDFLQLHEDWHYCGPQESKHSDPFRSKILKQKEKKKREKRQKPGRASSDGPAGEEPVAGQEALTLGLWSGPLPRVTLHCSRTLLGFVTQGDFSMAVGCGEALGFVSLTGLLDMLSSQPAAQRGLVLLRPPASLQYRFARIAIEV

SEQ ID NO: 327 - protein, 86 aa, Homo sapiens
MSLPLNPKPFLNGLTGKPVMVKLKWGMEYKGYLVSVDGYMNMQLANTEEYIDGALSGHLGEVLIRCNNVLYIRGVEEEEEDGEMRE

SEQ ID NO: 328 - protein, 483 aa, Homo sapiens
MSIRVTQKSYKVSTSGPRAFSSRSYTSGPGSRISSSSFSRVGSSNFRGGLGGGYGGASGMGGITAVTVNQSLLSPLVLEVDPNIQAVRTQEKEQIKTLNNKFASFIDKVRFLEQQNKMLETKWSLLQQQKTARSNMDNMFESYINNLRRQLETLGQEKLKLEAELGNMQGLVEDFKNKYEDEINKRTEMENEFVLIKKDVDEAYMNKVELESRLEGLTDEINFLRQLYEEEIRELQSQISDTSVVLSMDNSRSLDMDSIIAEVKAQYEDIANRSRAEAESMYQIKYEELQSLAGKHGDDLRRTKTEISEMNRNISRLQAEIEGLKGQRASLEAAIADAEQRGELAIKDANAKLSELEAALQRAKQDMARQLREYQELMNVKLALDIEIATYRKLLEGEESRLESGMQNMSIHTKTTSGYAGGLSSAYGGLTSPGLSYSLGSSFGSGAGSSSFSRTSSSRAVVVKKIETRDGKLVSESSDVLPK

SEQ ID NO: 329 - protein, 149 aa, Homo sapiens [sequence omitted]

SEQ ID NO: 330 - protein, 149 aa, Homo sapiens [sequence omitted]

SEQ ID NO: 331 - protein, 685 aa, Homo sapiens
MDVCVRLALWLLWGLLLHQGQSLSHSHSEKATGTSSGANSEESTAAEFCRIDKPLCHSEDEKLSFEAVRNIHKLMDDDANGDVDVEESDEFLREDLNYHDPTVKHSTFHGEDKLISVEDLWKAWKSSEVYNWTVDEVVQWLITYVELPQYEETFRKLQLSGHAMPRLAVTNTTMTGTVLKMTDRSHRQKLQLKALDTVLFGPPLLTRHNHLKDFMLVVSIVIGVGGCWFAYIQNRYSKEHMKKMMKDLEGLHRAEQSLHDLQERLHKAQEEHRTVEVEKVHLEKKLRDEINLAKQEAQRLKELREGTENERSRQKYAEEELEQVREALRKAEKELESHSSWYAPEALQKWLQLTHEVEVQYYNIKKQNAEKQLLVAKEGAEKIKKKRNTLFGTFHVAHSSSLDDVDHKILTAKQALSEVTAALRERLHRWQQIEILCGFQIVNNPGIHSLVAALNIDPSWMGSTRPNPAHFIMTDDVDDMDEEIVSPLSMQSPSLQSSVRQRLTEPQHGLGSQRDLTHSDSESSLHMSDRQRVAPKPPQMSRAADEALNAMTSNGSHRLIEGVHPGSLVEKLPDSPALAKKALLALNHGLDKAHSLMELSPSAPPGGSPHLDSSRSHSPSSPDPDTPSPVGDSRALQASRNTRIPHLAGKKAVAEEDNGSIGEETDSSPGRKKFPLKIFKKPLKK

SEQ ID NO: 332 - protein, 911 aa, Homo sapiens
MVDYHAANQSYQYGPSSAGNGAGGGGSMGDYMAQEDDWDRDLLLDPAWEKQQRKTFTAWCNSHLRKAGTQIENIDEDFRDGLKLMLLLEVISGERLPKPERGKMRVHKINNVNKALDFIASKGVKLVSIGAEEIVDGNAKMTLGMIWTIILRFAIQDISVEETSAKEGLLLWCQRKTAPYKNVNVQNFHISWKDGLAFNALIHRHRPELIEYDKLRKDDPVTNLNNAFEVAEKYLDIPKMLDAEDIVNTARPDEKAIMTYVSSFYHAFSGAQKAETAANRICKVLAVNQENEHLMEDYEKLASDLLEWIRRTIPWLEDRVPQKTIQEMQQKLEDFRDYRRVHKPPKVQEKCQLEINFNTLQTKLRLSNRPAFMPSEGKMVSDINNGWQHLEQAEKGYEEWLLNEIRRLERLDHLAEKFRQKASIHEAWTDGKEAMLKHRDYETATLSDIKALIRKHEAFESDLAAHQDRVEQIAAIAQELNELDYYDSHNVNTRCQKICDQWDALGSLTHSRREALEKTEKQLEAIDQLHLEYAKRAAPFNNWMESAMEDLQDMFIVHTIEEIEGLISAHDQFKSTLPDADREREAILAIHKEAQRIAESNHIKLSGSNPYTTVTPQIINSKWEKVQQLVPKRDHALLEEQSKQQSNEHLRRQFASQANVVGPWIQTKMEEIGRISIEMNGTLEDQLSHLKQYERSIVDYKPNLDLLEQQHQLIQEALIFDNKHTNYTMEHIRVGWEQLLTTIARTINEVENQILTRDAKGISQEQMQEFRASFNHFDKDHGGALGPEEFKACLISLGYDVENDRQGEAEFNRIMSLVDPNHSGLVTFQAFIDFMSRETTDTDTADQVIASFKVLAGDKNFITAEELRRELPPDQAEYCIARMAPYQGPDAVPGALDYKSFSTALYGESDL

SEQ ID NO: 333 - protein, 126 aa, Homo sapiens; identical to SEQ ID NO: 203

SEQ ID NO: 334 - protein, 2671 aa, Homo sapiens
MSEMSSFLHIGDIVSLYAEGSVNGFISTLGLVDDRCVVEPAAGDLDNPPKKFRDCLFKVCPMNRYSAQKQYWKAKQTKQDKEKIADVVLLQKLQHAAQMEQKQNDTENKKVHGDVVKYGSVIQLLHMKSNKYLTVNKRLPALLEKNAMRVTLDATGNEGSWLFIQPFWKLRSNGDNVVVGDKVILNPVNAGQPLHASNYELSDNAGCKEVNSVNCNTSWKINLFMQFRDHLEEVLKGGDVVRLFHAEQEKFLTCDEYKGKLQVFLRTTLRQSATSATSSNALWEVEVVHHDPCRGGAGHWNGLYRFKHLATGNYLAAEENPSYKGDASDPKAAGMGAQGRTGRRNAGEKIKYCLVAVPHGNDIASLFELDPTTLQKTDSFVPRNSYVRLRHLCTNTWIQSTNVPIDIEEERPIRLMLGTCPTKEDKEAFAIVSVPVSEIRDLDFANDASSMLASAVEKLNEGFISQNDRRFVIQLLEDLVFFVSDVPNNGQNVLDIMVTKPNRERQKLMREQNILKQVFGILKAPFREKGGEGPLVRLEELSDQKNAPYQHMFRLCYRVLRHSQEDYRKNQEHIAKQFGMMQSQIGYDILAEDTITALLHNNRKLLEKHITKTEVETFVSLVRKNREPRFLDYLSDLCVSNHIAIPVTQELICKCVLDPKNSDILIRTELRPVKEMAQSHEYLSIEYSEEEVWLTWTDKNNEHHEKSVRQLAQEARAGNAHDENVLSYYRYQLKLFARMCLDRQYLAIDEISQQLGVDLIFLCMADEMLPFDLRASFCHLMLHVHVDRDPQELVTPVKFARLWTEIPTAITIKDYDSNLNASRDDKKNKFANTMEFVEDYLNNVVSEAVPFANEEKNKLTFEVVSLAHNLIYFGFYSFSELLRLTRTLLGIIDCVQGPPAMLQAYEDPGGKNVRRSIQGVGHMMSTMVLSRKQSVFSAPSLSAGASAAEPLDRSKFEENEDIVVMETKLKILEILQFILNVRLDYRISYLLSVFKKEFVEVFPMQDSGADGTAPAFDSTTANMNLDRIGEQAEAMFGVGKTSSMLEVDDEGGRMFLRVLIHLTMHDYAPLVSGALQLLFKHFSQRQEAMHTFKQVQLLISAQDVENYKVIKSELDRLRTMVEKSELWVDKKGSGKGEEVEAGAAKDKKERPTDEEGFLHPPGEKSSENYQIVKGILERLNKMCGVGEQMRKKQQRLLKNMDAHKVMLDLLQIPYDKGDAKMMEILRYTHQFLQKFCAGNPGNQALLHKHLHLFLTPGLLEAETMQHIFLNNYQLCSEISEPVLQHFVHLLATHGRHVQYLDFLHTVIKAEGKYVKKCQDMIMTELTNAGDDVVVFYNDKASLAHLLDMMKAARDGVEDHSPLMYHISLVDLLAACAEGKNVYTEIKCTSLLPLEDVVSVVTHEDCITEVKMAYVNFVNHCYVDTEVEMKEIYTSNHIWTLFENFTLDMARVCSKREKRVADPTLEKYVLSVVLDTINAFFSSPFSENSTSLQTHQTIVVQLLQSTTRLLECPWLQQQHKGSVEACIRTLAMVAKGRAILLPMDLDAHISSMLSSGASCAAAAQRNASSYKATTRAFPRVTPTANQWDYKNIIEKLQDIITALEERLKPLVQAELSVLVDVLHWPELLFLEGSEAYQRCESGGFLSKLIQHTKDLMESEEKLCIKVLRTLQQMLLKKTKYGDRGNQLRKMLLQNYLQNRKSTSRGDLPDPIGTGLDPDWSAIAATQCRLDKEGATKLVCDLITSTKNEKIFQESIGLAIHLLDGGNTEIQKSFHNLMMSDKKSERFFKVLHDRMKRAQQETKSTVAVNMNDLGSQPHEDREPVDPTTKGRVASFSIPGSSSRYSLGPSLRRGHEVSERVQSSEMGTSVLIMQPILRFLQLLCENHNRDLQNFLRCQNNKTNYNLVCETLQFLDIMCGSTTGGLGLLGLYINEDNVGLVIQTLETLTEYCQGPCHENQTCIVTHESNGIDIITALILNDISPLCKYRMDLVLQLKDNASKLLLALMESRHDSENAERILISLRPQELVDVIKKAYLQEEERENSEVSPREVGHNIYILALQLSRHNKQLQHLLKPVKRIQEEEAEGISSMLSLNNKQLSQMLKSSAPAQEEEEDPLAYYENHTSQIEIVRQDRSMEQIVFPVPGICQFLTEETKHRLFTTTEQDEQGSKVSDFFDQSSFLHNEMEWQRKLRSMPLIYWFSRRMTLWGSISFNLAVFINIIIAFFYPYMEGASTGVLDSPLISLLFWILICFSIAALFTKRYSIRPLIVALILRSIYYLGIGPTLNILGALNLTNKIVFVVSFVGNRGTFIRGYKAMVMDMEFLYHVGYILTSVLGLFAHELFYSILLFDLIYREETLFNVIKSVTRNGRSILLTALLALILVYLFSIVGFLFLKDDFILEVDRLPNNHSTASPLGMPHGAAAFVDTCSGDKMDCVSGLSVPEVLEEDRELDSTERACDTLLMCIVTVMNHGLRNGGGVGDILRKPSKDESLFPARVVYDLLFFFIVIIIVLNLIFGVIIDTFADLRSEKQKKEEILKTTCFICGLERDKFDNKTVSFEEHIKLEHNMWNYLYFIVLVRVKNKTDYTGPESYVAQMIKNKNLDWFPRMRAMSLVSNEGEGEQNEIRILQDKLNSTMKLVSHLTAQLNELKEQMTEQRKRRQRLGFVDVQNCISR

SEQ ID NO: 335 - protein, 586 aa, Homo sapiens
MALEIHMSDPMCLIENFNEQLKVNQEALEILSAITQPVVVVAIVGLYRTGKSYLMNKLAGKNKGFSVASTVQSHTKGIWIWCVPHPNWPNHTLVLLDTEGLGDVEKADNKNDIQIFALALLLSSTFVYNTVNKIDQGAIDLLHNVTELTDLLKARNSPDLDRVEDPADSASFFPDLVWTLRDFCLGLEIDGQLVTPDEYLENSLRPKQGSDQRVQNFNLPRLCIQKFFPKKKCFIFDLPAHQKKLAQLETLPDDELEPEFVQQVTEFCSYIFSHSMTKTLPGGIMVNGSRLKNLVLTYVNAISSGDLPCIENAVLALAQRENSAAVQKAIAHYDQQMGQKVQLPMETLQELLDLHRTSEREAIEVFMKNSFKDVDQSFQKELETLLDAKQNDICKRNLEASSDYCSALLKDIFGPLEEAVKQGIYSKPGGHNLFIQKTEELKAKYYREPRKGIQAEEVLQKYLKSKESVSHAILQTDQALTETEKKKKEAQVKAEAEKAEAQRLAAIQRQNEQMMQERERLHQEQVRQMEIAKQNWLAEQQKMQEQQMQEQAAQLSTTFQAQNRSLLSELQHAQRTVNNDDPCVLL

SEQ ID NO: 336 - protein, 256 aa, Homo sapiens
MPLHKYPVWLWKRLQLREGICSRLPGHYLRSLEEERTPTPVHYRPHGAKFKINPKNGQRERVEDVPIPIYFPPESQRGLWGGEGWILGQIYANNDKLSKRLKKVWKPQLFEREFYSEILDKKFTVTVTMRTLDLIDEAYGLDFYILKTPKEDLCSKFGMDLKRGMLLRLARQDPQLHPEDPERRAAIYDKYKEFAIPEEEAEWVGLTLEEAIEKQRLLEEKDPVPLFKIYVAELIQQLQQQALSEPAVVQKRASGQ

SEQ ID NO: 337 - protein, 1215 aa, Homo sapiens
MTSTGQDSTTTRQRRSRQNPQSPPQDSSVTSKRNIKKGAVPRSIPNLAEVKKKGKMKKLGQAMEEDLIVGLQGMDLNLEAEALAGTGLVLDEQLNEFHCLWDDSFPEGPERLHAIKEQLIQEGLLDRCVSFQARFAEKEELMLVHSLEYIDLMETTQYMNEGELRVLADTYDSVYLHPNSYSCACLASGSVLRLVDAVLGAEIRNGMAIIRPPGHHAQHSLMDGYCMFNHVAVAARYAQQKHRIRRVLIVDWDVHHGQGTQFTFDQDPSVLYFSIHRYEQGRFWPHLKASNWSTTGFGQGQGYTINVPWNQVGMRDADYIAAFLHVLLPVALEFQPQLVLVAAGFDALQGDPKGEMAATPAGFAQLTHLLMGLAGGKLILSLEGGYNLRALAEGVSASLHTLLGDPCPMLESPGAPCRSAQASVSCALEALEPFWEVLVRSTETVERDNMEEDNVEESEEEGPWEPPVLPILTWPVLQSRTGLVYDQNMMNHCNLWDSHHPEVPQRILRIMCRLEELGLAGRCLTLTPRPATEAELLTCHSAEYVGHLRATEKMKTRELHRESSNFDSIYICPSTFACAQLATGAACRLVEAVLSGEVLNGAAVVRPPGHHAEQDAACGFCFFNSVAVAARHAQTISGHALRILIVDWDVHHGNGTQHMFEDDPSVLYVSLHRYDHGTFFPMGDEGASSQIGRAAGTGFTVNVAWNGPRMGDADYLAAWHRLVLPIAYEFNPELVLVSAGFDAARGDPLGGCQVSPEGYAHLTHLLMGLASGRIILILEGGYNLTSISESMAACTRSLLGDPPPLLTLPRPPLSGALASITETIQVHRRYWRSLRVMKVEDREGPSSSKLVTKKAPQPAKPRLAERMTTREKKVLEAGMGKVTSASFGEESTPGQTNSETAVVALTQDQPSEAATGGATLAQTISEAAIGGAMLGQTTSEEAVGGATPDQTTSEETVGGAILDQTTSEDAVGGATLGQTTSEEAVGGATLAQTTSEAAMEGATLDQTTSEEAPGGTELIQTPLASSTDHQTPPTSPVQGTTPQISPSTLIGSLRTLELGSESQGASESQAPGEENLLGEAAGGQDMADSMLMQGSRGLTDQAIFYAVTPLPWCPHLVAVCPIPAAGLDVTQPCGDCGTIQENWVCLSCYQVYCGRYINGHMLQHHGNSGHPLVLSYIDLSAWCYYCQAYVHHQALLDVKNIAHQNKFGEDMPHPH

SEQ ID NO: 338 - protein, 622 aa, Homo sapiens
MPPQLQNGLNLSAKVVQGSLDSLPQAVREFLENNAELCQPDHIHICDGSEEENGRLLGQMEEEGILRRLKKYDNCWLALTDPRDVARIESKTVIVTQEQRDTVPIPKTGLSQLGRWMSEEDFEKAFNARFPGCMKGRTMYVIPFSMGPLGSPLSKIGIELTDSPYVVASMRIMTRMGTPVLEAVGDGEFVKCLHSVGCPLPLQKPLVNNWPCNPELTLIAHLPDRREIISFGSGYGGNSLLGKKCFALRMASRLAKEEGWLAEHMLILGITNPEGEKKYLAAAFPSACGKTNLAMMNPSLPGWKVECVGDDIAWMKFDAQGHLRAINPENGFFGVAPGTSVKTNPNAIKTIQKNTIFTNVAETSDGGVYWEGIDEPLASGVTITSWKNKEWSSEDGEPCAHPNSRFCTPASQCPIIDAAWESPEGVPIEGIIFGGRRPAGVPLVYEALSWQHGVFVGAAMRSEATAAAEHKGKIIMHDPFAMRPFFGYNFGKYLAHWLSMAQHPAAKLPKIFHVNWFRKDKEGKFLWPGFGENSRVLEWMFNRIDGKASTKLTPIGYIPKEDALNLKGLGHINMMELFSISKEFWEKEVEDIEKYLEDQVNADLPCEIEREILALKQRISQM

SEQ ID NO: 339 - protein, 169 aa, Homo sapiens
MRGTPGDADGGGRAVYQSMCKPITGTINDLNQQVWTLQGQNLVAVPRSDSVTPVTVAVITCKYPEALEQGRGDPIYLGIQNPEMCLYCEKVGEQPTLQLKEQKIMDLYGQPEPVKPFLFYRAKTGRTSTLESVAFPDWFIASSKRDQPIILTSELGKSYNTAFELNIND

SEQ ID NO: 340 - protein, 233 aa, Homo sapiens
MSQSNRELVVDFLSYKLSQKGYSWSQFSDVEENRTEAPEGTESEMETPSAINGNPSWHLADSPAVNGATGHSSSLDAREVIPMAAVKQALREAGDEFELRYRRAFSDLTSQLHITPGTAYQSFEQVVNELFRDGVNWGRIVAFFSFGGALCVESVDKEMQVLVSRIAAWMATYLNDHLEPWIQENGGWDTFVELYGNNAAAESRKGQERFNRWFLTGMTVAGVVLLGSLFSRK

SEQ ID NO: 341 - protein, 564 aa, Homo sapiens
MASTSTTIRSHSSSRRGFSANSARLPGVSRSGFSSISVSRSRGSGGLGGACGGAGFGSRSLYGLGGSKRISIGGGSCAISGGYGSRAGGSYGFGGAGSGFGFGGGAGIGFGLGGGAGLAGGFGGPGFPVCPPGGIQEVTVNQSLLTPLNLQIDPAIQRVRAEEREQIKTLNNKFASFIDKVRFLEQQNKVLDTKWTLLQEQGTKTVRQNLEPLFEQYINNLRRQLDNIVGERGRLDSELRNMQDLVEDLKNKYEDEINKRTAAENEFVTLKKDVDAAYMNKVELQAKADTLTDEINFLRALYDAELSQMQTHISDTSVVLSMDNNRNLDLDSIIAEVKAQYEEIAQRSRAEAESWYQTKYEELQITAGRHGDDLRNTKQEIAEINRMIQRLRSEIDHVKKQCANLQAAIADAEQRGEMALKDAKNKLEGLEDALQKAKQDLARLLKEYQELMNVKLALDVEIATYRKLLEGEECRLNGEGVGQVNISVVQSTVSSGYGGASGVGSGLGLGGGSSYSYGSGLGVGGGFSSSSGRATGGGLSSVGGGSSTIKYTTTSSSSRKSYKH

SEQ ID NO: 342 - protein, 400 aa, Homo sapiens
MTSYSYRQSSATSSFGGLGGGSVRFGPGVAFRAPSIHGGSGGRGVSVSSARFVSSSSSGAYGGGYGGVLTASDGLLAGNEKLTMQNLNDRLASYLDKVRALEAANGELEVKIRDWYQKQGPGPSRDYSHYYTTIQDLRDKILGATIENSRIVLQIDNARLAADDFRTKFETEQALRMSVEADINGLRRVLDELTLARTDLEMQIEGLKEELAYLKKNHEEEISTLRGQVGGQVSVEVDSAPGTDLAKILSDMRSQYEVMAEQNRKDAEAWFTSRTEELNREVAGHTEQLQMSRSEVTDLRRTLQGLEIELQSQLSMKAALEDTLAETEARFGAQLAHIQALISGIEAQLGDVRADSERQNQEYQRLMDIKSRLEQEIATYRSLLEGQEDHYNNLSASKVL

SEQ ID NO: 343 - protein, 114 aa, Homo sapiens
MTCKMSQLERNIETIINTFHQYSVKLGHPDTLNQGEFKELVRKDLQNFLKKENKNEKVIEHIMEDLDTNADKQLSFEEFIMLMARLTWASHEKMHEGDEGPGHHHKPGLGEGTP

SEQ ID NO: 344 - protein, 1231 aa, Homo sapiens
MRLLAKIICLMLWAICVAEDCNELPPRRNTEILTGSWSDQTYPEGTQAIYKCRPGYRSLGNVIMVCRKGEWVALNPLRKCQKRPCGHPGDTPFGTFTLTGGNVFEYGVKAVYTCNEGYQLLGEINYRECDTDGWTNDIPICEVVKCLPVTAPENGKIVSSAMEPDREYHFGQAVRFVCNSGYKIEGDEEMHCSDDGFWSKEKPKCVEISCKSPDVINGSPISQKIIYKENERFQYKCNMGYEYSERGDAVCTESGWRPLPSCEEKSCDNPYIPNGDYSPLRIKHRTGDEITYQCRNGFYPATRGNTAKCTSTGWIPAPRCTLKPCDYPDIKHGGLYHENMRRPYFPVAVGKYYSYYCDEHFETPSGSYWDHIHCTQDGWSPAVPCLRKCYFPYLENGYNQNYGRKFVQGKSIDVACHPGYALPKAQTTVTCMENGWSPTPRCIRVKTCSKSSIDIENGFISESQYTYALKEKAKYQCKLGYVTADGETSGSITCGKDGWSAQPTCIKSCDIPVFMNARTKNDFTWFKLNDTLDYECHDGYESNTGSTTGSIVCGYNGWSDLPICYERECELPKIDVHLVPDRKKDQYKVGEVLKFSCKPGFTIVGPNSVQCYHFGLSPDLPICKEQVQSCGPPPELLNGNVKEKTKEEYGHSEVVEYYCNPRFLMKGPNKIQCVDGEWTTLPVCIVEESTCGDIPELEHGWAQLSSPPYYYGDSVEFNCSESFTMIGHRSITCIHGVWTQLPQCVAIDKLKKCKSSNLIILEEHLKNKKEFDHNSNIRYRCRGKEGWIHTVCINGRWDPEVNCSMAQIQLCPPPPQIPNSHNMTTTLNYRDGEKVSVLCQENYLIQEGEEITCKDGRWQSIPLCVEKIPCSQPPQIEHGTINSSRSSQESYAHGTKLSYTCEGGFRISEENETTCYMGKWSSPPQCEGLPCKSPPEISHGVVAHMSDSYQYGEEVTYKCFEGFGIDGPAIAKCLGEKWSHPPSCIKTDCLSLPSFENAIPMGEKKDVYKAGEQVTYTCATYYKMDGASNVTCINSRWTGRPTCRDTSCVNPPTVQNAYIVSRQMSKYPSGERVRYQCRSPYEMFGDEEVMCLNGNWTEPPQCKDSTGKCGPPPPIDNGDITSFPLSVYAPASSVEYQCQNLYQLEGNKRITCRNGQWSEPPKCLHPCVISREIMENYNIALRWTAKQKLYSRTGESVEFVCKRGYRLSSRSHTLRTTCWDGKLEYPTCAKR

SEQ ID NO: 345 - protein, 245 aa, Homo sapiens
MNNKFDALKDDDSGDHDQNEENSTQKDGEKEKTERDKNQSSSKRKAVVPGPAEHPLQYNYTFWYSRRTPGRPTSSQSYEQNIKQIGTFASVEQFWRFYSHMVRPGDLTGHSDFHLFKEGIKPMWEDDANKNGGKWIIRLRKGLASRCWENLILAMLGEQFMVGEEICGAVVSVRFQEDIISIWNKTASDQATTARIRDTLRRVLNLPPNTIMEYKTHTDSIKMPGRLGPQRLLFQNLWKPRLNVP

SEQ ID NO: 346 - protein, 248 aa, Homo sapiens [sequence omitted]

SEQ ID NO: 347 - protein, 265 aa, Homo sapiens
MSAAPLVGYSSSGSEDESEDGMRTRPGDGSHRRGQSPLPRQRFPVPDSVLNMFPGTEEGPEDDSTKHGGRVRTFPHERGNWATHVYVPYEAKEEFLDLLDVLLPHAQTYVPRLVRMKVFHLSLSQSVVLRHHWILPFVQALKARMTSFHRFFFTANQVKIYTNQEKTRTFIGLEVTSGHAQFLDLVSEVDRVMEEFNLTTFYQDPSFHLSLAWCVGDARLQLEGQCLQELQAIVDGFEDAEVLLRVHTEQVRCKSGNKFFSMPLK

SEQ ID NO: 348 - protein, 778 aa, Homo sapiens
MAQKMDCGAGLLGFQAEASVEDSALLMQTLMEAIQISEAPPTNQATAAASPQSSQPPTANEMADIQVSAAAARPKSAFKVQNATTKGPNGVYDFSQAHNAKDVPNTQPKAAFKSQNATPKGPNAAYDFSQAATTGELAANKSEMAFKAQNATTKVGPNATYNFSQSLNANDLANSRPKTPFKAWNDTTKAPTADTQTQNVNQAKMATSQADIETDPGISEPDGATAQTSADGSQAQNLESRTIIRGKRTRKINNLNVEENSSGDQRRAPLAAGTWRSAPVPVTTQNPPGAPPNVLWQTPLAWQNPSGWQNQTARQTPPARQSPPARQTPPAWQNPVAWQNPVIWPNPVIWQNPVIWPNPIVWPGPVVWPNPLAWQNPPGWQTPPGWQTPPGWQGPPDWQGPPDWPLPPDWPLPPDWPLPTDWPLPPDWIPADWPIPPDWQNLRPSPNLRPSPNSRASQNPGAAQPRDVALLQERANKLVKYLMLKDYTKVPIKRSEMLRDIIREYTDVYPEIIERACFVLEKKFGIQLKEIDKEEHLYILISTPESLAGILGTTKDTPKLGLLLVILGVIFMNGNRASEAVLWEALRKMGLRPGVRHPLLGDLRKLLTYEFVKQKYLDYRRVPNSNPPEYEFLWGLRSYHETSKMKVLRFIAEVQKRDPRDWTAQFMEAADEALDALDAAAAEAEARAEARTRMGIGDEAVSGPWSWDDIEFELLTWDEEGDFGDPWSRIPFTFWARYHQNARSRFPQTFAGPIIGPGGTASANFAANFGAIGFFWVE

SEQ ID NO: 349 - protein, 399 aa, Homo sapiens
MAVTMLQDWCRWMGVNARRGLLILGIPEDCDDAEFQESLEAALRPMGHFTVLGKAFREEDNATAALVELDREVNYALVPREIPGTGGPWNVVFVPRCSGEEFLGLGRVFHFPEQEGQMVESVAGALGVGLRRVCWLRSIGQAVQPWVEAVRCQSLGVFSGRDQPAPGEESFEVWLDHTTEMLHVWQGVSERERRRRLLEGLRGTALQLVHALLAENPARTAQDCLAALAQVFGDNESQATIRVKCLTAQQQSGERLSAFVLRLEVLLQKAMEKEALARASADRVRLRQMLTRAHLTEPLDEALRKLRMAGRSPSFLEMLGLVRESEAWEASLARSVRAQTQEGAGARAGAQAVARASTKVEAVPGGPGREPEGLLQAGGQEAEELLQEGLKPVLEECDN

SEQ ID NO: 350 - protein, 310 aa, Homo sapiens
MRRAALWLWLCALALSLQPALPQIVATNLPPEDQDGSGDDSDNFSGSGAGALQDITLSQQTPSTWKDTQLLTAIPTSPEPTGLEATAASTSTLPAGEGPKEGEAVVLPEVEPGLTAREQEATPRPRETTQLPTTHLASTTTATTAQEPATSHPHRDMQPGHHETSTPAGPSQADLHTPHTEDGGPSATERAAEDGASSQLPAAEGSGEQDFTFETSGENTAVVAVEPDRRNQSPVDQGATGASQGLLDRKEVLGGVIAGGLVGLIFAVCLVGFMLYRMKKKDEGSYSLEEPKQANGGAYQKPTKQEEFYA

SEQ ID NO: 351 - protein, 155 aa, Homo sapiens
MVLSGALCFRMKDSALKVLYLHNNQLLAGGLHAGKVIKGEEISVVPNRWLDASLSPVILGVQGGSQCLSCGVGQEPTLTLEPVNIMELYLGAKESKSFTFYRRDMGLTSSFESAAYPGWFLCTVPEADQPVRLTQLPENGGWNAPITDFYFQQCD

SEQ ID NO: 352 - protein, 159 aa, Homo sapiens
MPKFYCDYCDTYLTHDSPSVRKTHCSGRKHKENVKDYYQKWMEEQAQSLIDKTTAAFQQGKIPPTPFSAPPPAGAMIPPPPSLPGPPRPGMMPAPHMGGPPMMPMMGPPPPGMMPVGPAPGMRPPMGGHMPMMPGPPMMRPPARPMMVPTRPGMTRPDR

SEQ ID NO: 353 - protein, 525 aa, Homo sapiens
MWEAQFLGLLFLQPLWVAPVKPLQPGAEVPVVWAQEGAPAQLPCSPTIPLQDLSLLRRAGVTWQHQPDSGPPAAAPGHPLAPGPHPAAPSSWGPRPRRYTVLSVGPGGLRSGRLPLQPRVQLDERGRQRGDFSLWLRPARRADAGEYRAAVHLRDRALSCRLRLRLGQASMTASPPGSLRASDWVILNCSFSRPDRPASVHWFRNRGQGRVPVRESPHHHLAESFLFLPQVSPMDSGPWGCILTYRDGFNVSIMYNLTVLGLEPPTPLTVYAGAGSRVGLPCRLPAGVGTRSFLTAKWTPPGGGPDLLVTGDNGDFTLRLEDVSQAQAGTYTCHIHLQEQQLNATVTLAIITVTPKSFGSPGSLGKLLCEVTPVSGQERFVWSSLDTPSQRSFSGPWLEAQEAQLLSQPWQCQLYQGERLLGAAVYFTELSSPGAQRSGRAPGALPAGHLLLFLILGVLSLLLLVTGAFGFHLWRRQWRPRRFSALEQGIHPPQAQSKIEELEQEPEPEPEPEPEPEPEPEPEQL

SEQ ID NO: 354 - protein, 1250 aa, Homo sapiens
MWLSPEEVLVANALWVTERANPFFVLQRRRGHGRGGGLTGLLVGTLDVVLDSSARVAPYRILHQTQDSQVYWTVACGSSRKEITKHWEWLENNLLQTLSIFDSEEDITTFVKGKIHGIIAEENKNLQPQGDEDPGKFKEAELKMRKQFGMPEGEKLVNYYSCSYWKGRVPRQGWLYLTVNHLCFYSFLLGKEVSLVVQWVDITRLEKNATLLFPESIRVDTRDQELFFSMFLNIGETFKLMEQLANLAMRQLLDSEGFLEDKALPRPIRPHRNISALKRDLDARAKNECYRATFRLPRDERLDGHTSCTLWTPFNKLHIPGQMFISNNYICFASKEEDACHLIIPLREVTIVEKADSSSVLPSPLSISTKSKMTFLFANLKDRDFLVQRISDFLQKTPSKQPGSIGSRKASVVDPSTESSPAPQEGSEQPASPASPLSSRQSFCAQEAPTASQGLLKLFQKNSPMEDLGAKGAKEKMKEESWHIHFFEYGRGVCMYRTAKTRALVLKGIPESLRGELWLLFSGAWNEMVTHPGYYAELVEKSTGKYSLATEEIERDLHRSMPEHPAFQNELGIAALRRVLTAYAFRNPTIGYCQAMNIVTSVLLLYGSEEEAFWLLVALCERMLPDYYNTRVVGALVDQGIFEELTRDFLPQLSEKMQDLGVISSISLSWFLTLFLSVMPFESAVVIVDCFFYEGIKVILQVALAVLDANMEQLLGCSDEGEAMTMLGRYLDNVVNKQSVSPPIPHLRALLSSSDDPPAEVDIFELLKVSYEKFSSLRAEDIEQMRFKQRLKVIQSLEDTAKRSVVRAIPVDIGFSIEELEDLYMVFKAKHLASQYWGCSRTMAGRRDPSLPYLEQYRIDASQFRELFASLTPWACGSHTPLLAGRMFRLLDENKDSLINFKEFVTGMSGMYHGDLTEKLKVLYKLHLPPALSPEEAESALEAAHYFTEDSSSEASPLASDLDLFLPWEAQEALPQEEQEGSGSEERGEEKGTSSPDYRHYLRMWAKEKEAQKETIKDLPKMNQEQFIELCKTLYNMFSEDPMEQDLYHAIATVASLLLRIGEVGKKFSARTGRKPRDCATEEDEPPAPELHQDAARELQPPAAGDPQAKAGGDTHLGKAPQESQVVVEGGSGEGQGSPSQLLSDDETKDDMSMSSYSVVSTGSLQCEDLADDTVLVGGEACSPTARIGGTVDTDWCISFEQILASILTESVLVNFFEKRVDIGLKIKDQKKVERQFSTASDHEQPGVSG

SEQ ID NO: 355 - protein, 118 aa, Homo sapiens
MDVFLMIRRHKTTIFTDAKESSTVFELKRIVEGILKRPPDEQRLYKDDQLLDDGKTLGECGFTSQTARPQAPATVGLAFRADDTFEALCIEPFSSPPELPDVMKPQDSGSSANEQAVQ

SEQ ID NO: 356 - protein, 543 aa, Homo sapiens
MEQVNELKEKGNKALSVGNIDDALQCYSEAIKLDPHNHVLYSNRSAAYAKKGDYQKAYEDGCKTVDLKPDWGKGYSRKAAALEFLNRFEEAKRTYEEGLKHEANNPQLKEGLQNMEARLAERKFMNPFNMPNLYQKLESDPRTRTLLSDPTYRELIEQLRNKPSDLGTKLQDPRIMTTLSVLLGVDLGSMDEEEEIATPPPPPPPKKETKPEPMEEDLPENKKQALKEKELGNDAYKKKDFDTALKHYDKAKELDPTNMTYITNQAAVYFEKGDYNKCRELCEKAIEVGRENREDYRQIAKAYARIGNSYFKEEKYKDAIHFYNKSLAEHRTPDVLKKCQQAEKILKEQERLAYINPDLALEEKNKGNECFQKGDYPQAMKHYTEAIKRNPKDAKLYSNRAACYTKLLEFQLALKDCEECIQLEPTFIKGYTRKAAALEAMKDYTKAMDVYQKALDLDSSCKEAADGYQRCMMAQYNRHDSPEDVKRRAMADPEVQQIMSDPAMRLILEQMQKDPQALSEHLKNPVIAQKIQKLMDVGLIAIR

SEQ ID NO: 357 - protein, 317 aa, Homo sapiens
MPREDRATWKSNYFLKIIQLLDDYPKCFIVGADNVGSKQMQQIRMSLRGKAVVLMGKNTMMRKAIRGHLENNPALEKLLPHIRGNVGFVFTKEDLTEIRDMLLANKVPAAARAGAIAPCEVTVPAQNTGLGPEKTSFFQALGITTKISRGTIEILSDVQLIKTGDKVGASEATLLNMLNISPFSFGLVIQQVFDNGSIYNPEVLDITEETLHSRFLEGVRNVASVCLQIGYPTVASVPHSIINGYKRVLALSVETDYTFPLAEKVKAFLADPSAFVAAAPVAAATTAAPAAAAAPAKVEAKEESEESDEDMGFGLFD

SEQ ID NO: 358 - protein, 193 aa, Homo sapiens
MAAEPVEDNCINFVAMKFIDNTLYFIAEDDENLESDYFGKLESKLSVIRNLNDQVLFIDQGNRPLFEDMTDSDCRDNAPRTIFIISMYKDSQPRGMAVTISVKCEKISTLSCENKIISFKEMNPPDNIKDTKSDIIFFQRSVPGHDNKMQFESSSYEGYFLACEKERDLFKLILKKEDELGDRSIMFTVQNED

SEQ ID NO: 359 - protein, 482 aa, Homo sapiens
MAAVRMLRTWSRNAGKLICVRYFQTCGNVHVLKPNYVCFFGYPSFKYSHPHHFLKTTAALRGQVVQFKLSDIGEGIREVTVKEWYVKEGDTVSQFDSICEVQSDKASVTITSRYDGVIKKLYYNLDDIAYVGKPLVDIETEALKDSEEDVVETPAVSHDEHTHQEIKGRKTLATPAVRRLAMENNIKLSEVVGSGKDGRILKEDILNYLEKQTGAILPPSPKVEIMPPPPKPKDMTVPILVSKPPVFTGKDKTEPIKGFQKAMVKTMSAALKIPHFGYCDEIDLTELVKLREELKPIAFARGIKLSFMPFFLKAASLGLLQFPILNASVDENCQNITYKASHNIGIAMDTEQGLIVPNVKNVQICSIFDIATELNRLQKLGSVGQLSTTDLTGGTFTLSNIGSIGGTFAKPVIMPPEVAIGALGSIKAIPRFNQKGEVYKAQIMNVSWSADHRVIDGATMSRFSNLWKSYLENPAFMLLDLK

SEQ ID NO: 360 - protein, 699 aa, Homo sapiens
MSASASVGGPVPQPPPGPAAALPPGSAARALHVELPSQQRRLRHLRNIAARNIVNRNGHQLLDTYFTLHLCSTEKIYKEFYRSEVIKNSLNPTWRSLDFGIMPDRLDTSVSCFVVKIWGGKENIYQLLIEWKVCLDGLKYLGQQIHARNQNEIIFGLNDGYYGAPFEHKGYSNAQKTILLQVDQNCVRNSYDVFSLLRLHRAQCAIKQTQVTVQKIGKEIEEKLRLTSTSNELKKKSECLQLKILVLQNELERQKKALGREVALLHKQQIALQDKGSAFSAEHLKLQLQKESLNELRKECTAKRELFLKTNAQLTIRCRQLLSELSYIYPIDLNEHKDYFVCGVKLPNSEDFQAKDDGSIAVALGYTAHLVSMISFFLQVPLRYPIIHKGSRSTIKDNINDKLTEKEREFPLYPKGGEKLQFDYGVYLLNKNIAQLRYQHGLGTPDLRQTLPNLKNFMEHGLMVRCDRHHTSSAIPVPKRQSSIFGGADVGFSGGIPSPDKGHRKRASSENERLQYKTPPPSYNSALAQPVTTVPSMGETERKITSLSSSLDTSLDFSKENKKKGEDLVGSLNGGHANVHPSQEQGEALSGHRATVNGTLLPSEQAGSASVQLPGEFHPVSEAELCCTVEQAEEIIGLEATGFASGDQLEAFNCIPVDSAVAVECDEQVLGEFEEFSRRIYALNENVSSFRRPRRSSDK

SEQ ID NO: 361 - protein, 211 aa, Homo sapiens [sequence omitted]

SEQ ID NO: 362 - protein, 603 aa, Homo sapiens
MSCGNEFVETLKKIGYPKADNLNGEDFDWLFEGVEDESFLKWFCGNVNEQNVLSERELEAFSILQKSGKPILEGAALDEALKTCKTSDLKTPRLDDKELEKLEDEVQTLLKLKNLKIQRRNKCQLMASVTSHKSLRLNAKEEEATKKLKQSQGILNAMITKISNELQALTDEVTQLMMFFRHSNLGQGTNPLVFLSQFSLEKYLSQEEQSTAALTLYTKKQFFQGIHEVVESSNEDNFQLLDIQTPSICDNQEILEERRLEMARLQLAYICAQHQLIHLKASNSSMKSSIKWAEESLHSLTSKAVDKENLDAKISSLTSEIMKLEKEVTQIKDRSLPAVVRENAQLLNMPVVKGDFDLQIAKQDYYTARQELVLNQLIKQKASFELLQLSYEIELRKHRDIYRQLENLVQELSQSNMMLYKQLEMLTDPSVSQQINPRNTIDTKDYSTHRLYQVLEGENKKKELFLTHGNLEEVAEKLKQNISLVQDQLAVSAQEHSFFLSKRNKDVDMLCDTLYQGGNQLLLSDQELTEQFHKVESQLNKLNHLLTDILADVKTKRKTLANNKLHQMEREFYVYFLKDEDYLKDIVENLETQSKIKAVSLED

SEQ ID NO: 363 - protein, 623 aa, Homo sapiens
MATEHVNGNGTEEPMDTTSAVIHSENFQTLLDAGLPQKVAEKLDEIYVAGLVAHSDLDERAIEALKEFNEDGALAVLQQFKDSDLSHVQNKSAFLCGVMKTYRQREKQGTKVADSSKGPDEAKIKALLERTGYTLDVTTGQRKYGGPPPDSVYSGQQPSVGTEIFVGKIPRDLFEDELVPLFEKAGPIWDLRLMMDPLTGLNRGYAFVTFCTKEAAQEAVKLYNNHEIRSGKHIGVCISVANNRLFVGSIPKSKTKEQILEEFSKVTEGLTDVILYHQPDDKKKNRGFCFLEYEDHKTAAQARRRLMSGKVKVWGNVGTVEWADPIEDPDPEVMAKVKVLFVRNLANTVTEEILEKAFSQFGKLERVKKLKDYAFIHFDERDGAVKAMEEMNGKDLEGENIEIVFAKPPDQKRKERKAQRQAAKNQMYDDYYYYGPPHMPPPTRGRGRGGRGGYGYPPDYYGYEDYYDYYGYDYHNYRGGYEDPYYGYEDFQVGARGRGGRGARGAAPSRGRGAAPPRGRAGYSQRGGPGSARGVRGARGGAQQQRGRGVRGARGGRGGNVGGKRKADGYNQPDSKRRQTNNQNWGSQPIAQQPLQGGDHSGNYGYKSENQEFYQDTFGQQWK

SEQ ID NO: 364 - protein, 312 aa, Homo sapiens
MEEECRVLSIQSHVIRGYVGNRAATFPLQVLGFEIDAVNSVQFSNHTGYAHWKGQVLNSDELQELYEGLRLNNMNKYDYVLTGYTRDKSFLAMVVDIVQELKQQNPRLVYVCDPVLGDKWDGEGSMYVPEDLLPVYKEKVVPLADIITPNQFEAELLSGRKIHSQEEALRVMDMLHSMGPDTVVITSSDLPSPQGSNYLIVLGSQRRRNPAGSVVMERIRMDIRKVDAVFVGTGDLFAAMLLAWTHKHPNNLKVACEKTVSTLHHVLQRTIQCAKAQAGEGVRPSPMQLELRMVQSKRDIEDPEIVVQATVL

SEQ ID NO: 365 - protein, 822 aa, Homo sapiens [sequence omitted]

SEQ ID NO: 366 - protein, 843 aa, Homo sapiens
MAKPLTDSEKRKQISVRGLAGLGDVAEVRKSFNRHLHFTLVKDRNVATPRDYFFALAHTVRDHLVGRWIRTQQHYYERDPKRIYYLSLEFYMGRTLQNTMVNLGLQNACDEAIYQLGLDLEELEEIEEDAGLGNGGLGRLAACFLDSMATLGLAAYGYGIRYEFGIFNQKIVNGWQVEEADDWLRYGNPWEKARPEYMLPVHFYGRVEHTPDGVKWLDTQVVLAMPYDTPVPGYKNNTVNTMRLWSAKAPNDFKLQDFNVGDYIEAVLDRNLAENISRVLYPNDNFFEGKELRLKQEYFVVAATLQDIIRRFKSSKFGCRDPVRTCFETFPDKVAIQLNDTHPALSIPELMRILVDVEKVDWDKAWEITKKTCAYTNHTVLPEALERWPVSMFEKLLPRHLEIIYAINQRHLDHVAALFPGDVDRLRRMSVIEEGDCKRINMAHLCVIGSHAVNGVARIHSEIVKQSVFKDFYELEPEKFQNKTNGITPRRWLLLCNPGLADTIVEKIGEEFLTDLSQLKKLLPLVSDEVFIRDVAKVKQENKLKFSAFLEKEYKVKINPSSMFDVHVKRIHEYKRQLLNCLHVVTLYNRIKRDPAKAFVPRTVMIGGKAAPGYHMAKLIIKLVTSIGDVVNHDPVVGDRLKVIFLENYRVSLAEKVIPAADLSQQISTAGTEASGTGNMKFMLNGALTIGTMDGANVEMAEEAGAENLFIFGLRVEDVEALDRKGYNAREYYDHLPELKQAVDQISSGFFSPKEPDCFKDIVNMLMHHDRFKVFADYEAYMQCQAQVDQLYRNPKEWTKKVIRNIACSGKFSSDRTITEYAREIWGVEPSDLQIPPPNIPRD

SEQ ID NO: 367 - protein, 501 aa, Homo sapiens
MAAASVTPPGSLELLQPGFSKTLLGTKLEAKYLCSACRNVLRRPFQAQCGHRYCSFCLASILSSGPQNCAACVHEGIYEEGISILESSSAFPDNAARREVESLPAVCPSDGCTWKGTLKEYESCHEGRCPLMLTECPACKGLVRLGEKERHLEHECPERSLSCRHCRAPCCGADVKAHHEVCPKFPLTCDGCGKKKIPREKFQDHVKTCGKCRVPCRFHAIGCLETVEGEKQQEHEVQWLREHLAMLLSSVLEAKPLLGDQSHAGSELLQRCESLEKKTATFENIVCVLNREVERVAMTAEACSRQHRLDQDKIEALSSKVQQLERSIGLKDLAMADLEQKVLEMEASTYDGVFIWKISDFARKRQEAVAGRIPAIFSPAFYTSRYGYKMCLRIYLNGDGTGRGTHLSLFFVVMKGPNDALLRWPFNQKVTLMLLDQNNREHVIDAFRPDVTSSSFQRPVNDMNIASGCPLFCPVSKMEAKNSYVRDDAIFIKAIVDLTGL

SEQ ID NO: 368 - protein, 1739 aa, Homo sapiens
MGEKLELRLKSPVGAEPAVYPWPLPVYDKHHDAAHEIIETIRWVCEEIPDLKLAMENYVLIDYDTKSFESMQRLCDKYNRAIDSIHQLWKGTTQPMKLNTRPSTGLLRHILQQVYNHSVTDPEKLNNYEPFSPEVYGETSFDLVAQMIDEIKMTDDDLFVDLGSGVGQVVLQVAAATNCKHHYGVEKADIPAKYAETMDREFRKWMKWYGKKHAEYTLERGDFLSEEWRERIANTSVIFVNNFAFGPEVDHQLKERFANMKEGGRIVSSKPFAPLNFRINSRNLSDIGTIMRVVELSPLKGSVSWTGKPVSYYLHTIDRTILENYFSSLKNPKLREEQEAARRRQQRESKSNAATPTKGPEGKVAGPADAPMDSGAEEEKAGAATVKKPSPSKARKKKLNKKGRKMAGRKRGRPKKMNTANPERKPKKNQTALDALHAQTVSQTAASSPQDAYRSPHSPFYQLPPSVQRHSPNPLLVAPTPPALQKLLESFKIQYLQFLAYTKTPQYKASLQELLGQEKEKNAQLLGAAQQLLSHCQAQKEEIRRLFQQKLDELGVKALTYNDLIQAQKEISAHNQQLREQSEQLEQDNRALRGQSLQLLKARCEELQLDWATLSLEKLLKEKQALKSQISEKQRHCLELQISIVELEKSQRQQELLQLKSCVPPDDALSLHLRGKGALGRELEPDASRLHLELDCTKFSLPHLSSMSPELSMNGQAAGYELCGVLSRPSSKQNTPQYLASPLDQEVVPCTPSHVGRPRLEKLSGLAAPDYTRLSPAKIVLRRHLSQDHTVPGRPAASELHSRAEHTKENGLPYQSPSVPGSMKLSPQDPRPLSPGALQLAGEKSSEKGLRERAYGSSGELITSLPISIPLSTVQPNKLPVSIPLASVVLPSRAERARSTPSPVLQPRDPSSTLEKQIGANAHGAGSRSLALAPAGFSYAGSVAISGALAGSPASLTPGAEPATLDESSSSGSLFATVGSRSSTPQHPLLLAQPRNSLPASPAHQLSSSPRLGGAAQGPLPEASKGDLPSDSGFSDPESEAKRRIVFTITTGAGSAKQSPSSKHSPLTASARGDCVPSHGQDSRRRGRRKRASAGTPSLSAGVSPKRRALPSVAGLFTQPSGSPLNLNSMVSNINQPLEITAISSPETSLKSSPVPYQDHDQPPVLKKERPLSQTNGAHYSPLTSDEEPGSEDEPSSARIERKIATISLESKSPPKTLENGGGLAGRKPAPAGEPVNSSKWKSTFSPISDIGLAKSADSPLQASSALSQNSLFTFRPALEEPSADAKLAAHPRKGFPGSLSGADGLSPGTNPANGCTFGGGLAADLSLHSFSDGASLPHKGPEAAGLSSPLSFPSQRGKEGSDANPFLSKRQLDGLAGLKGEGSRGKEAGEGGLPLCGPTDKTPLLSGKAAKARDREVDLKNGHNLFISAAAVPPGSLLSGPGLAPAASSAGGAASSAQTHRSFLGPFPPGPQFALGPMSLQANLGSVAGSSVLQSLFSSVPAAAGLVHVSSAATRLTNSHAMGSFSGVAGGTVGGVVFNHAVPSASAHPFGARVGRGAACGSATLGPSPLQAAASASASSFQAPASVETRPPPPPPPPPPPLPPPAHLGRSPAGPPVLHAPPPPNAALPPPPTLLASNPEPALLQSLASLPPNQAFLPPTSAASLPPANASLSIKLTSLPHKGARPSFTVHHQPLPRLALAQAAPGIPQASATGPSAVWVSLGMPPPYAAHLSGVKPR
